United States Patent Application Publication US 2011/0252501 A1 - sequence listing, part 7

SEQ ID NO: 28288 - protein, 196 aa, Glycine max
  misc_feature (60)..(60): Xaa can be any naturally occurring amino acid
MAAIAGAHVFGVVSFQLKQAEMPFACSSLIRKHIGDSPQRNVALRRRANGTILPQIRAQXVLPDYVPKSEFYKVEAILRPWRVPQVSAALLKMGIRGVTVSDVRGFGAQGGSKERQGGSEFSEDNFVAKVKMEVVVRKDQVEAVIDKIIEEARTGEIGDGKIFLIPISDVIRIRTGERGEQAARMTGGRSDMLSAV

SEQ ID NO: 28289 - protein, 326 aa, Mycoplasma genitalium G37
MSKIQVNNIEALNNAMDLALERDQNVVLYGQDAGFEGGVFRATKGLQQKYGSERVWDCPIAENSMAGIGVGAAIGGLKPIVEIQFSGFSFPAMFQIFVHAARIRNRSRGVYTAPLVVRMPMGGGIKALEHHSETLEAIYAQIAGLKTVMPSNPYDTKGLFLAAIESPDPVIFFEPKKLYRAFRQEIPSDYYTVPIGEANLISEGSELTIVSYGPTMFDLINLVYSGELKDKGIELIDLRTISPWDKQTVFNSVKKTGRLLVVTEAVKSFTTSAEIITSVTEELFTYLKKAPQRVTGFDIVVPLARGEKYQFEINARVIDAVNQLLK

SEQ ID NO: 28290 - protein, 168 aa, Triticum aestivum
MAARARTVAAMSSNSSILLAAAVALALLVSSASAQSGCTAALVGLYPCMNYISGNDTAPTKSCCSQLGSVVQSQPQCLCSALGGDSSSLGGVTINKTRALELPNACNVQTPPASKCDGAGGGSAPGAGSGSKTTPTAYLQGSGGSSLHGTARLVLALSAAAIFVVSTV

SEQ ID NO: 28291 - protein, 635 aa, Oryza sativa (japonica cultivar-group)
MASSLLSSPKPSSFSSANPTSTPRPRAQTLSPFRAAAPRFSHGLATAAAAANPSASRRCYHRAFARPVRASMAQPRRPEYVPNRIDDPNYVRIFDTTLRDGEQSPGATMTSAEKLVVARQLARLGVDIIEAGFPASSPDDLDAVRSIAIEVGNTPVGEDGHVPVICGLSRCNKRDIDAAWEAVRHARRPRIHTFIATSEIHMQHKLRKTPEQVVAIAKEMVAYARSLGCPDVEFSPEDAGRSNREFLYHILEEVIKAGATTLNIPDTVGYTLPYEFGKLIADIKANTPGIENAIISTHCQNDLGLATANTLAGAHAGARQLEVTINGIGERAGNASLEEVVMAIKCRRELLGGLYTGINTQHITMSSKMVQEHSGLHVQPHKAIVGANAFAHESGIHQDGMLKYKGTYEIISPDDIGLTRANEFGIVLGKLSGRHAVRSKLVELGYEITDKEFEDFFKRYKEVAEKKKRVTDEDIEALLSDEIFQPKVFWSLADVQATCGTLGLSTATVKLIGPDGEEKIACAVGTGPVDAAYKAVDDIIQIPTVLREYSMTSVTEGIDAIATTRVVVTGDVSDSKHALTGHSFSRAFSGSGAALDIVVSSVRAYLSALNKMSSFVGAIKASSEVSESQRVQTTE

SEQ ID NO: 28292 - protein, 829 aa, Bordetella bronchiseptica RB50
MARRDFIKQTAAAAAATVAGVPLTGYTQNIVTESEAAKLKWSKAPCRFCGTGCGVNVAVKDNQVVATHGDFNAEVNKGLNCVKGYFLSKIMYGSDRLTQPLLRMKDGKYAKDGEFAPVSWDQAFDVMAEQFKRVLKDKGPEAVGMFGSGQWTVWEGYAALKLMKAGFRTNNLDPNARHCMASAAVGFMRTFGADEPMGCYDDIENADAFVLWGSNMAEMHPILWTRVTDRRLSAPATKVAVLSTFEHRSYELADLTLTFEPQSDLAILNYIANHIIRTKRVNRDFVDKHTVFREGNADIGYGLRPEHPLQQAARNAGDAGGSKPITFDDFARFVSKYDLEYTAKLSGVPKNRLEELAELYADPKVRVTSFWTMGFNQHTRGVWCNNMVYNIHLLTGKISTPGNSPFSLTGQPSACGTAREVGTFSHRLPADLVVTNPEHRRHAEEIWKLPDGTIPSKVGAHAVLQNRMLKDGKINAYWVMVNNNMQAAANLMNEGLPGYRNPENFIVVSDAYPTVTTLSADLILPAAMWVEKEGAYGNAERRTQFWHQLVDAPGQARSDLWQLVEFSKRFKVEEVWPADLLAKKPEYRGKTLYDVLFANGKVNQFPNTELDAEYANQEAQAFGFYLQKGLFEEYAEFGRGHGHDLAPFDVYHKARGLRWPVVDGKETLWRYREGSDPYVKPGTGFQFYGNPDGKAVIFALPYEPPPEAPDKEYPFWLSTGRVLEHWHSGSMTRRVPELYKAFPEAVCFMHPDDAQALGVRRGVEVEVVSRRGRMRTRVETRGRDKPPRGLVFVPWFDAGQLINKVTLDATDPISFQTDFKKCAVKIVKV

SEQ ID NO: 28293 - protein, 127 aa, Brassica napus
ALPSESVFPERPGQLECQFYMKTGDCKFGTVCKFHHPRDRQAPPPDCLLSPIGLPLRPGEPLCVFYSRYGICKFGPSCKFHHPMEVFAYDNTASETDEVVETSGGHSRRVSVFETRQATTSGEDTTN

SEQ ID NO: 28294 - protein, 138 aa, Shorea macroptera
EKNIPVLLGLLSIWNVSFLGYPARAILPYSQALEKFAPHIQQVSMESNGKGVSIDGMPLPYEAGEIDFGEPGTNGQHSFYQLIHQGRVIPCDFIGSAKSQQPIHLKGEVVSNHDELMSNFFAQPDALAFGKTPEELHR

SEQ ID NO: 28295 - protein, 404 aa, Oryza sativa
MAAATTSRRGPGAMDDENLTFETSPGVEVISSFDQMGIREDLLRGIYAYGFEKPSAIQQRAVLPIISGRDVIAQAQSGTGKTSMISLSVCQIVDTAVREVQALILSPTRELAAQTERVMLAIGDYINIQVHACIGGKSIGEDIRKLEHGVHVVSGTPGRVCDMIKRRTLRTRAIKLLILDEADEMLGRGFKDQIYDVYRYLPPELQVCLISATLPHEILEMTSKFMTDPVRILVKRDELTLEGIKQFFVAVEKEEWKFDTLCDLYDTLTITQAVIFCNTKRKVDWLTERMRSNNFTVSAMHGDMPQKERDAIMGEFRSGATRVLITTDVWARGLDVQQVSLVINYDLPNNRELYIHRIGRSGRFGRKGVAINFVKKEDIRILRDIEQYYSTQIDEMPMNVADLI

SEQ ID NO: 28296 - protein, 594 aa, Frankia sp. CcI3
MCGLSGELRFDGRGANVDAVVRMTATMVPRGPDGVGVWSAGPVAFGHRRLKIIDLSECGAQPMVDNELGLTTVFNGCIYNYQELRDELIAAGYRFFSTSDTEVIGKAYHRWGRRCVDHFAGMFAFAIAERDSGRLILARDRLGIKPLYLTGNSERLRFASTLPALLAGGGVSSDIDLVAFHHYLSFHSVVPAPHTILAGVRKLPAATVRVVEPDGTSTDDLYWRPSFTRDPAHADWTARDWQDAIAERLRLAVRRRMVADVPVGVLLSGGLDSSLIVALLAEAGQKDLATFSVGFEAVGGEPGDEFVYSDVIARYFDTDHHQIRVPGTRLLPAVDAAVAAMSEPMVSHDCVAFYLLSQEVSRHVKVVQSGQGADEVFAGYSWYPPLAGVGRTDAVDAYLRVFADRPHRDLPAMVEPHHLIEADASRHFVASHFARPGAETAVDAALRIDSTIMLVDDPVKRVDNMTMAAGLEARTPFLDHELVELAAACPPELKLASGGKGVLKNIGRPLMPVDVIDRPKGYFPVPAIRHLDGPFLDRVREALTDPAAKARGLFRPVWVQTMLAAPNDNRTALGANALWQAALLEMWLQTHTVA

SEQ ID NO: 28297 - protein, 339 aa, Oryza sativa (japonica cultivar-group)
MPRPGDGNPRAVTLIPGDGIGPLVTGAVQQVMEVMHAPVYFETYEVRGDMPTVPPAVIESIRRNKVCLKGGLATPVGGGVSSLNMQLRKELDLYASLVNCSNFPGLPTRHQDVDIVVIRENTEGEYSGLEHEVVPGVVESLKVITKFCSERIAKYAFEYAYLNNRKKVTAVHKANIMKLADGLFLESCREVASKYPGIQYNEIIVDNCCMQLVAKPEQFDVMVTPNLYGNLVANTAAGIAGGTGVMPGGNVGQDHAVFEQGASAGNVGNENILEQKKANPIALLLSSAMMLRHLQFPSFADRLETAVKRVIAEGKYRTKDLGGTSTTQEVTDAVIANLD

SEQ ID NO: 28298 - protein, 637 aa, Arabidopsis thaliana
MFGPTGGLGMNPSMDDMNLIQQAQRHQLVVSNLGEEIDLEIGPGEDDAAFANNSLIGGPPREPSTGEHDETKHMVLVSDLPSEDQDISKGTPAKRKKKVVKRWREEWADTYKWAYVDMKDGTARIFCSICREYGRKHRRNPYGNEGSRNMQMSALEEHNNSLLHKEALRLQTASKDKIVVDKPIYVKTVMSKSAGSIVEGALKRDPNEIEFVQSVQESVHALERVIAKNSHYVNIMERLLEPERMIVFRVPWIDDRGETHVNRGFRVQFNQALGPCRGGIRFHPSMNLSIAKFLGFQQTLKNALSPYKLGGASGGSDFDPKGKSDNEIMRFCQSFMNEMYRYMGPDKDLPSEEVGVGTREMGYLFGQYRRLAGQFQGSFTGPRIYWAASSLRTEASGYGVVYFARLILADMNKEIKGLRCVVSGCGKIAMHVVEKLIACGAHPVTVSDSKGYLVDDDGFDYMKLAFLRDIKSQQRSLRDYSKTYARAKYFDELKPWNERCDVAFPCASQNEVDQADAINLVNAGCRLLVEGSNMPCTAEAVDVFRKANVLIAPAIAAGAGGVAAGEIEVLRESNSMQWSAEDFESRLQEALKQTYEKALKAANDFGYQKESPEALLHGATIAAFLNIAQAMTDQGCV

SEQ ID NO: 28299 - protein, 181 aa, Zea mays
MASSMLSSATVVSSPAQAAMVAPFTGLKSSAAFPVTRKTDTDITSMASNGGRVNCMKVWPPVGKKKFETLSYLPDLTDVELSKEVDYLLRNKWIPCVEFELEHGFVYREHGNTPGYYDGRYWTMWKLPLFGCTDSAQVLKEVQECKKEYPNAFIRIIGFDNNRQVQCISFIAYKPPSFTGA

SEQ ID NO: 28300 - protein, 338 aa, Hypocrea lixii
MSIKVGINGFGRIGRILLSNALEKPELSVVAVNDPFIEPTYAAYMLKYDSSHGLFKGDIEVDGQNLVVNGKPIRFYSERDPANIKWSETGAEYIVESTGVFTTIDKAKAHLNGGAKKVIISAPSADAPMFVMGVNHKDYDGTPTVLSNASCTTNGLAPLVKIVNDNFGIVEGLMTTVHSYTATQKTVDGPSGKDWRGGRGAAQNIIPSSTGAAKAVGKVIPAMNGKITGMSFRVPSANVSVIDLTVRLEKAASYEEITSAIKKAADGELKGIMAYTSDEVVSTDMLGNNNSSIFDIKAGISLNPNFVKLVSWYDNEWGYSRRVLDLLEHVAKVDASKK

SEQ ID NO: 28301 - protein, 443 aa, Desulfotalea psychrophila LSv54
MTRRAGIKFTGIGLAFLSLSVTGQPVHGAEQELTHSVAEIAYGLDTLYLLLSGAMVMWMAAGFSMLECGLVRSKNVVEILTKNITLFAIASIACLLVGYNIMYGDGGSILPSFSFLVGGDHSPADISLGGENHYSRIADFFFQVVFVATAMSVVSGAIAERMKLWAFLLFAVVMCSAIYPVQGYWKWGGGFLDHLGFLDFAGSGVVHLCGASAALAGVLLLGPRLGKYKNGRIKAIPGSNLPLASLGTFILWFGWFGFNGGSQLRISTVSDANAVAMAFANTNMAAAGGLLAALILSRIWFGKADLTMALNGALAGLVAITAEPVTPSLLTATGVGAVAGILVVISIILLDKAHIDDPVGAISVHGVSGIWGLLAVTITNPEASLIAQLIGITTIFSWVFITSIITWFAIKKVMGLRISPEEEHEGVDLCECGLTAYPEFTKD

SEQ ID NO: 28302 - protein, 625 aa, Streptomyces sp. JP95
MSAIAGWVDFERDLSPQAATVETMAAALAHRGPDGRGVWAEGHAALAHRRLALLDLTETGAQPAVHTTEGGAAVAVLTLDGALTNHTELRARLAAKGHRFTGRGDGETALHAYLEWGADFLTRLEGLFAIAVWDVRRQELLLARDRLGVKPLSYHPTPTGVLFGSEPKAILAHPDVDAVVDADGLRELFAHSRKPGTGVFRGMREVVPGHALIVRRPGSREQRYWSLPAREHTDSLDTTVATVRGLLADAVASHTRADAPVGAMLSGGIDSSALSALAHRDLTAAGSGPLRTFSVNFTGYTENFEPHPTMRSTPDAPFAALASRHIGSRHTEFLLDTAALTDPGVHTAALRSQDAPSPLGDMDVSLLRFFARLREEGFAAVLSGETADEVFNGYFWAYDPKHSNSQTFPWVSFERGHDAAAGGLGTSMIDRELRKRLDFLGYADQHYRDALTEVPHVDGDTAAERRAREVTYLALTRWAPTHLDRADRMSMAHGVQLRPPFCDRALVEYVYNVPAAMKRVDGVEKSLLRSAVADLLPDEVLHRRKSAYPTTQEAAYGDFVRQRFAELAADRDAAVAELLDTTATAEAVAADGSPQGAFAWVERAGMEMALQLDTWLTDYRVDLRL

SEQ ID NO: 28303 - protein, 112 aa, Desulfotalea psychrophila LSv54
MKKIEAIIKPFKLEEIKEALTELAITGMTISEVKGYGRQKGHKEMYRGAEYSIDFNPKLKIELVVRAEIADKVVEKIRLAARTGKIGDGKIFVLPIEEVVRVRTGEQGREAI

SEQ ID NO: 28304 - protein, 364 aa, Arabidopsis thaliana
MTTISDLSDDLVGDILSRVPFTSLISVRSTCKKWNALSKNQIFGRKTAARNQFLEFMILDSRVCSLRLDLQGIRNEDKEDFVDPSMKLISIPSNDDQVEISQVYHCDGLLLCIAKENSNVFVWNPYLGQTKWIRPRNTFHRYDRFALGYDNNRNHKILRFLYDEESNESSRRTHIDVYDFSSDSWRVLDVNPDCDIPFYQTGVSLKGNTYFFERFGPCLPLLFYPPCPSFETVTLSWVRDEKLAVLYNHYVTAEIIEIRISTKIEPNAVSWSSFLTVDMSLVNGLPDHFSMYFEAKSFFIDEEKKVVVLFDSKEIKTCRYQMAYIVGDDGYFKSVNIGVSPNSQRKPGRLVCSSYVPSLVQLQD

SEQ ID NO: 28305 - protein, 102 aa, Acinetobacter baumannii
RGATGEVIQDVVNIGVGGSDLGPQMVTHALCDFKVKTANPLNVHFVSTMDGSQLSDLLHQLRPETPLFIISSKSFGTIDTLSNAQTVRQWLEKALGKHERVV

SEQ ID NO: 28306 - protein, 161 aa, Glycine max
MTTTLERGFSEEQEALVVKSWNVMKKNSGELGLKFFLKIFEIAPSAQKLFSFLRDSTVPLEQNPKLKPHAVSVFVMTCDSAVQLRKAGKVTVRESNLKKLGATHFRTGVANEHFEVTKFALLETIKEAVPEMWSPAMKNAWGEAYDQLVDAIKSEMKPPSS

SEQ ID NO: 28307 - protein, 586 aa, Triphysaria versicolor
MCGILAVLGCSDDSQAKRVRVLELSRRLKHRGPDWSGIHHHGDCYLAHQRLAIVDPASGDQPLFNEDKRIAVTVNGEIYNHEELRALLPNHKFRTGSDCDVIAHLYEEYGENFVEMLDGMFSFVLLDSRDNTFIAARDAFGITSLYIGWGLDGSVWISSELKGLHDECENFEVFPPGHVYSSKTEGFRRWYNPPWFSEAIPSTPYDPLVLRGAFEQAVIKRLMTDVPFGVLLSGGLDSSLVAAVTARHLAGTKAAKRWGSQLHSFCVGLEGSPDLKAGKEVADYLGTVHHEFLFTVQDGIDAIEDVIYHIETYDVTTIRASTPMFLMSRKIKSLGVKMVISGEGSDEIFGGYLYFHKAPNKEEFHRETCRKIKALHQYDCLRANKATSAWGLEARVPFLDKEFVNLAMSIDPEAKMIKPDQGRIEKWILRKAFDDEERPYLPKHILYRQKEQFSDGVGYSWIDGLKAHAEQHVTDKMMLNAGHIFPHNTPTTKEGYYYRMIFERFFPQNSAKLTVPGGPSVACSTATAVAWDASWSKNLDPSGRAATGVHDLAYENHVPIGNLKSKKMDSVSLGNAVGPQELTIRS

SEQ ID NO: 28308 - protein, 221 aa, Medicago truncatula
MKIIYFLVSILALASSLAFAYDPSPLQDFCVAIKDPKDGVFVNGKFCKDPALVKAEDFFKHVEAGNASNALGSQVTPVTVDQLFGLNTLGISLARVDFAPKGLNPPHIHPRGTEILIVLEGTLYVGFVTSNQDNNRLFTKVLNKGDVFVFPIGLIHFQLNVGYGNAVAIAGLSSQNPGVITVANALFKSDPLISDEVLTKAFQVDKSIIDYLQKQSWYDNN

SEQ ID NO: 28309 - protein, 507 aa, Solanum melongena
MDVPCLWYSLLILLLLFIFLLIHHCFTTSKTQNMFLPPSPRKLPIIGNLHQLGSHPHRSLRKLSQKYGPVMLLHLGSKPVIVASSVDAARDILKTHDHVWATRPKYSIADSLLYGSKDVGFSPFGEYWWQVRSIVVLHLLSNKRVQSYRDVREEETANMIEKIRQGCDASVINLGEHLCFLTNNITSRVALGRTYDERESGIDAKDILEQFLQLLDTFNVGDYIPWLKWVNKITGLDTKVEKIAKKLDTFLDSVIEEHIIRNKKEEYAITDEAKDFVDVLLEIQNGKETDFPLQRDSLKAILLDAFAAGTDTIYTNLDWTMADVLRQPRAMKTLQNEVRGLAQGKSEITEDDLKNMQYLRAVIKESLRLHPPNSLLVPRESMEDVKLLGYYHIPARTQALINVWAIGRDPLSWENPEEFCPERFLNNDIDMKGLKFELLPFGSGRRGCPGSSFAIAVIELALARLVHKFNFALPKGTKPEDLDMTECTGIATRRKSPLPVVATPFSG

SEQ ID NO: 28310 - protein, 105 aa, Triticum aestivum
  misc_feature (30)..(30): Xaa can be any naturally occurring amino acid
ETYGYRWLAPEIIDGDPESVSETCMSNVYXYGMVLWEMVTGEEAYSTYSPVQAAVGIAACGLRPEIPRDCPPFLRSLMSRCWDNCPLKRPQFSEIISTLQKQSLR

SEQ ID NO: 28311 - protein, 148 aa, Kluyveromyces lactis NRRL Y-1140
MSSLKRITKELNDLGRDPPTSCSAGPVGDDVYHWQASIMGPPDSPYAGGVFFLSIHFPTDYPFKPPKISFTTKIYHPNINANGNICLDILKDQWSPALTISKVLLSICSLLTDANPDDPLVPEIAHLYKTDRAKYEATAREWTKKYAI

SEQ ID NO: 28312 - protein, 294 aa, Idiomarina baltica OS145
MSDDNPHSASGSSQKSWAAKLLQVFAGEPKSREELVDLIQDAEERDLIDNDTKEMIEGVLDVAELKVRDIMIPRSQMVTIDIHQSVEEFLPIVIESQHSRYPVVTDNKDHVEGILLAKDLLSYGFNFTEDSFSLSEVMRPAVIVPESKRVDVLLKEFRSNRYHMAIVVDEYGGVSGLVTIEDILEEIVGEIEDETDHNDDDKADIKRLSASRYSVKALTTIEDFNDHFNSQFADDEIDTVGGLVAHGFGHLPQPGEQITLSGFTFKVTSADKRRIQQLQVTPPTSDTYTEESQG

SEQ ID NO: 28313 - protein, 380 aa, Blastopirellula marina DSM 3645
GHVDHGKTTTTGAILAVQAAKGLAKNKAYSEIAKGGTVRDATKTVTIAVAHVEYETPNRHYAHIDCPGHADFVKNMITGAAQMDGAILVVSAADGPMPQTKEHVLLARQVGVPYVCVFLNKCDLVDDEELLDLVELEVRELLSKYEFPGDDCPVIRGASLPAYNNPADPEASKCITELMEALDTYIPEPTREADKPFLMAIEDVFSIEGRGTVATGRIERGVVKVGEEVLIIGLNDAPTKTTVTGIEMFNKILQEGYAGDNVGCLLRGVKREDISRGQVLAKPGTITPHTKFEAEIYCLSKEEGGRHTPFFSGYRPQFYFRTTDVTGTANLIGAEMCMPGDNVRIEVELHKPIAMDDGVRFAIREGGRTVGSGVVTKIIA

SEQ ID NO: 28314 - protein, 411 aa, Arabidopsis thaliana
MLEGAKFNVLAVGNHHNNDNNYYAFTQEFYQKLNECSNMSMESMQTSNAGGSVSMSVDNSSVGSSDALIGHPGLKPMRHYSLSDGQSVFRPGRVTHALNDDALAQALMDTRYPTEGLTNYEEWTIDLRKLNMGPAFAQGAFGKLYKGTYNGEDVAIKILERSDNSPEKAQALEQQFQQEVSMLANLKHPNIVRFIGACSKPMVWCIVTEYAKGGSVRQFLTRRQNRAVPLKLAVKQALDVARGMAYVHGRNFIHRDLKSDNLLISADKSIKIADFGVARIEVQTEGMTPETGTYRWMAPEMIQHRAYNQKVDVYSFGIVLWELITGLLPFQNMTAVQAAFAVVNRGVRPTVPNDCLPVLSDIMTRCWDANPEVRPCFVEVVKLLEAAETEIMTTARKARFRCCLSQPMTID

SEQ ID NO: 28315 - protein, 542 aa, Zea mays
MSAAQLLRHSRKLRSLQNPVGCENFSFVRHFSSGSGSFIARENGIGKRTRGTRFSQHNQPAKQLETFSAGVNGSCTWRIASNSLTPSAASWLSGSFSCGQVVSARPFSSSADLPPHQEIGMPSLSPTMTEGNIAKWLKKEGDKVSPGEVLCEVETDKATVEMECMEEGYLAKIIHGDGAKEIKVGEVIAITVEEEGDIEKLKDYKPSSSAEPVAPAEPKAEPEPSQPKAEEKKPTQAPEAKTPKIEEASQSGDRIFASPLARKLAEDNNVPLSSVKGTGPDGRILKADIEDYLASVAKGGLRESFADPGLGYVDIPNAQIRKVTANRLLASKQTIPHYYLTVDARVDKLVQLRGELNPLQDASGGKKISINDLVIKAAALALRKVPQCNSSWMNDFIRQYHNVNINVAVQTEHGLFVPVIRDADKKGLGAIAEEVKQLAQKARDNSLKPADYEGGTFTVSNLGGPFGIKQFCAIINPPQSAILAIGSAEKRVIPGSADGQFEFGSFMSATLSCDHRVIDGAIGAEFLKAFKGYIENPTSMLL

SEQ ID NO: 28316 - protein, 555 aa, Vibrio fischeri ES114
MCSIFGILDIKSDPTPLRTTALEMSKKLRHRGPDWSGIYSSDKAILAHERLAIVGLNSGAQPLYSEDKKHILAVNGEIYNHKELREKYADNYTFQTDSDCEVILALYREKGADLLEDLNGIFAFILYDEEKDEYLIGRDHIGIIPMYHGYDEHGNYYVASEMKALVPVCKSISEFPPGHFYSSKDTEPTRYYLRDWMDYDAVKDNPTSKEDLTQALEDAVKRQLMTDVPYGVLLSGGLDSSITSAVAKRFAAMRIEDDEKSEAWWPQLHSFAVGLEGAPDLKAAREVADKLGTVHHEMTYTIQEGLDAIRDVIYHIETYDVTTIRASTPMFLMGRKIKAMGIKMVLSGEGADEIFGGYLYFHKAPNKKEFHEETVRKLLALNMFDCARANKSLAAWGVEGRVPFLDKEFIDVAMRLNPQDKMCGNGKMEKHILRECFEHYLPEAIAWRQKEQFSDGVGYSWIDTLRETAEAKVTDQQMESAKFRFPYNTPTTKEAYVYREIFEELFPLEDAAKCVPGGPSVACSSAKAIEWDESFQNCVDPSGRAVQAVHNEAYD

SEQ ID NO: 28317 - protein, 118 aa, Zea mays
MNKTGARLRLAPNMWMATGSEASKAAEAVVDRHKQDSKKMLHAVYRVGDLDRTIKYYTECFGMKLLRKRDVPDEKYTNAFLGFGSENTNFAVELTNFAEVSRPACVAPLPGSVLAVPL

SEQ ID NO: 28318 - protein, 108 aa, Escherichia coli
SDKIIHLTDDSFDTDVLKADGAILVDFWAEWCGPCKLIASILDEIADEYQGKLTVAKLNIDQNPGTAPKYGIRGIPTLLLFKNGEVAATKVGALSKGQLKEFLDANLA

SEQ ID NO: 28319 - protein, 720 aa, Mycoplasma genitalium G37
MATIQEIECDFLAKIAQKFTNAEIELINKAFYHAKTWHENQKRLSGEPFFIHPLRTALSLVEWNMDPITICAGLLHDIIEDTDQTEANIAMIFSKEIAELVTKVTKITNESKKQRHLKNKKENLNLKSFVNIAINSQQEINVMVLKLADRLDNIASIEFLPIEKQKVIAKETLELYAKIAGRIGMYPVKTKLADLSFKVLDLKNYDNTLSKINKQKVFYDNEWDNFKQQLKKILAQNQIEYQLESRIKGIYSTYKKLTVHEQNISKIHDLFAIRLITKSELDCYHILGLIHLNFLIDSKYFKDYIASPKQNLYQSIHTTVRLKGLNVEIQIRTQQMDNVSKFGLASHWIYKEQKEGLLAPALQLNYLVTKQKHSHDFLKRIFGTDIIKINVSASHEPNVIKQINVDSNNKLLDIAFENYPKQFAKLTKIEIDGVEINSFDTSVENEMLIEFYFGKNNNLKSKWIRYMNNPIYREKVKKSLAKLAKSGRYSELAFYEKELGEKQLKLASETEIQKRLNTLRIKKMSDYLALIECTNFTNDEHLLFLAKNNDKWNKLTKPLKFAFSKVVFHNSYFEQIEGIFITKIVIEPCCSKIPDMPEQVTGILTKNILSVHRYGCKNLQNKKQLKIIPLYWNIQQLKLKPRKFRSYININGVWSEKTINKICQTIINGDGYIEKIIPKINKQKDEFDLNITLFVNNYQQLLTLMDQITTKNISFSWKYL

SEQ ID NO: 28320 - protein, 364 aa, Haloarcula marismortui ATCC 43049
MQGADADTVADALASDDALPGAGGFAGELDGTLVRDVLGRYPLFVERAVSDEARLDPGQWSHDPTALADPRSFPAGHIRNESGTQQRWSLPSLDPFGDRETAIETVGETVETSIDAVDTDSLAIAFSGGVDSALLAARLDAPLYVAGFPDSHDIEAARSAAELLGTEVRVVELTHDAIERAVPEIARATARTNAMDVQIALPLYLVAERVAGDGFDRLALGQGADELFGGYAKVAKAPEDPRVEADTVRGAQREVIASLPDQLERDVLALRAAGVEPVTPLLHDRVIGAALRLDGDLLVDGETRKVALRAAARESLPDEIADRDKKAAQYGSLAARELDRLARQAGYKRRMDDHVTQYVESLVE

SEQ ID NO: 28321 - protein, 335 aa, Solibacter usitatus Ellin6076
MAIKVGINGFGRIGRNVVRAGLHNSDVEFVAVNDLTDTATLAHLLKYDSVLGTLPETVTHDATSITVGGKTIKVFATKDPAELDWASVGAQIVIESTGRFTDGKDAAKHMRGTVKKVIISAPAKNEDVTLVLGVNDAAYDAKKHNIISNASCTTNCLAPVVKVLNEKFGVEKGSMTTIHSYTNDQNVLDFPHKDLRRARAAALNMIPTTTGAAKAIGLVLPELKGKLDGYSMRVPTPDVSVVDFVCILKKPSTTEAVNAALKAASEGELKGILGYTEDPVVSTDMLRNPNSSIVDAQLTKVLDGNLLKVVAWYDNEWGYSSRVVDLVGFLAAKGL

SEQ ID NO: 28322 - protein, 162 aa, Corynebacterium efficiens YS-314
MEAMTSIHDIPVTLTDGTETTMADWAGHLVMVVNVASRCGLTPQYEGLQRLFEDYQDRGFFVIGVPCNQFMGQEPGTDAEICTFAQEKYDVTFPLLAKTDVNGENEHPLYTELKRFGEGGDIEWNFEKFLINADGETIARFGPRMDPEDDEVTSVIEDNLPV

SEQ ID NO: 28323 - protein, 483 aa, Mycoplasma genitalium G37
MTKKTQDLTSWYDQLLVKAKLICHGEVKGTVCFLNNSWGLWMEIQQLYNDAIANKNQLSAIALTKFQPTTSFCYQVFQVQLPTLSFYSEYQKEKTHIKGFNPELFLINQVGQKQLNDPLVLRPTSEIAFCNLWKKQELSYHDLPLIYNQWTQVFRAEKNTRPFLRNSEFYWQETHGLFVDQSQSEQAAISFWNLYQDLIINKLCIPAFVGLKSESEKFAGAKNTWTIEAIMPDGQSLQCATSHDLGDTFTKSFTISYQSKTNQKMTPSSFSCGMSTRILGAIFLTHSDDYGLVLPWYLASKQVKLYLFDKNNNPKTRALAFLVKDFLEKLKIRFSFIEINNQLGKQLLKGEIEGIPLQMIVDNEKTINIFNRLTRLKTSLTFANLQTEFVNLVNNYHTEMYRKANDLVEQKLARVQTLKEIEQAFKNKKAVLCTVKLTGELEQHLKTKYQVSVRCVFKKSDVTQNCPFTNQPCFDSVLIARAY

SEQ ID NO: 28324 - protein, 451 aa, Shewanella oneidensis MR-1
MSLVVAKFGGTSVADYGAMNRCAEIVLGNPDCRLVVVSASSGVTNLLVELTQESINDDGRLQRLKQIAQIQYAILDKLGRPNDVAAALDKLLSRMAVLSEALVSARSKATMDELLSLGEQCSSALFAAVLREKGANSSAFDVRRVLRTDSHFGRAEPQVEQIALLSREHLLPLLSEQVIVTQGFIGADEAGQTTTLGRGGSDYSAALLAEALTASAVEIWTDVAGIYTTDPRLAPNAHPIAEISFNEAAEMATFGAKVLHPATILPAVRQQIQVFVGSSKEPEKGGTWIRHQVEDAPVFRAVALRRDQTLLNLHSLQMLHAQGFLAETFATLARHKISVDLITTSEVNVSLTLDKTGSDSSGQGLLSEALLQELSQHCRVRVEDGLALVAIIGNRIATTAGICRRVFEVLEPHNVRMICQGASPHNLCVLVAESEAAQVVKALHENLFEGA

SEQ ID NO: 28325 - protein, 316 aa, Neisseria meningitidis MC58
MSQHRKLIILGSGPAGYTAAVYAARANLNPVIITGIAQGGQLMTTTEVDNWPADADGVQGPELMARFLAHAERFGTEIIFDQINAVDLQKRPFTLKGDMGEYTCDALIVATGASAKYLGLPSEEAFAGKGVSACATCDGFFYKNQDVAVVGGGNTAVEEALYLANIAKTVTLIHRRSEFRAEKIMIDKLMKRVEEGKIILKLESNLQEVLGDDRGVNGALLKNNDGSEQQIAVSGIFIAIGHKPNTDIFKGQLEMDEAGYLKTKGGTADNVGATNIEGVWAAGDVKDHTYRQAITSAASGCQAALDAERWLGSQNI

SEQ ID NO: 28326 - protein, 567 aa, Zea mays
MASAALICGTEQWKALQAHVGAIQKTHLRDLMADADRCKAMTAEYEGIFLDYSRQQATGETMEKLLKLADAAKLKEKIEKMFKGEKINSTENRSVLHVALRAPRDAVINSDGVNVVPEVWSVKDKIKQFSETFRSGSWVGATGKPLTNVVSVGIGGSFLGPLFVHTALQTDPEAAECAKGRQLRFLANVDPVDVARSIKDLDPETTLVVVVSKTFTTAETMLNARTLKEWIVSSLGPQAVAKHMIAVSTNLKLVKEFGIDPNNAFAFWDWVGGRYSVCSAVGVLPLSLQYGFPIVQKFLEGASSIDNHFYSSSFEKNIPVLLGLLSVWNVSFLGYPARAILPYSQALEKLAPHIQQLSMESNGKGVSIDGAQLSFETGEIDFGEPGTNGQHSFYQLIHQGRVIPCDFIGVVKSQQPVYLKGETVSNHDELMSNFFAQPDALAYGKTPEQLHSEKVPENLIPHKTFKGNRPSLSLLLPTLSAYEVGQLLSIYEHRIAVQGFIWGINSFDQWGVELGKSLASQVRKQLHGTRMEGKPVEGFNHSTSSLLARYLAVKPSTPYDTTVLPKV

SEQ ID NO: 28327 - protein, 337 aa, Magnetospirillum magnetotacticum MS-1
MSKTGTTKTAVVLFNLGGPDSLDAVKPFLFNLFSDPAILGVPAPIRWFLARYISAKRAPTARGIYQLLGGRSPLVPETEAQGRALEHVLGHGFKCFIAMRYWHPFTREAVAAIKEWGADEVILLPLYPQFSTTTTGSSLKEWHKQAKALGLTVPTRFACCYPTEPGLIAAMADLAKAGYDEARAAGKPRILFSAHGLPKSVIDKGDPYQAQIELTASSVARETGIGDLDWAICYQSRVGPQEWIGPSTEDELDRAARDGVPVVIVPVAFVSEHSETLVELDIEYRHKADQLGIPAYVRVPALGCHPAFIRGLADVVHRPQAFTGQACKLLGRSCSAC

SEQ ID NO: 28328 - protein, 230 aa, uncultured bacterium
MRHFERHRTAHIGWLRAAVLGANDGLISTASLVVGVAASGTGRPAVLIAAVAGLVAGAMSMAAGEYVSVSSQADTESADLARERHELATTPDAEKDELVGIYIDRGLTPALARQVADQLMERDALGAHSRDELGLSPATSARPIQAALASAAAFAVGATLPVAVAAIAPTAWLTRLVTASALVLLTVLGAVAARVGGAAIGRGAVRVAFWGALAMAVSAGVGRLFGTQFP

SEQ ID NO: 28329 - protein, 334 aa, delta proteobacterium MLMS-1
MGIKVAINGFGRIGRSIFRAIELDPTFKEIEIVAINDLTPPATLAHLLKYDSVMGIYPHEVKAGDGEIRVDDHPVRVYNQRDPKELPWGELGVEYVIEATGLFTDSDKAQAHLDAGAKKVVISAPAKGQVKTIVMGVNEEDYDPATDHIVSNASCTTNCLAPVAKVIVERFGIKSGLMTTVHAYTGDQRLLDFPHNDLRRARAAAMSMIPTKTGAAAAVALVLPELKGKFDGLAVRVPTPNVSLVDVVMELEQETTVTEVNEALKQATNRYLGYSEEPLVSIDYQGDPRSSVVDAISTKVLGSTVKILSWYDNEWGYSNRVLDLILHMEENRTL

SEQ ID NO: 28330 - protein, 356 aa, Oryza sativa
MGVLCFGASNILLCAEDSSSVLGLGGFGGGGGEVAAELGCGGGGGFDFFGFGGGAVFPIDSDEFVALLVEKEMDHQPQRGYLEKLELGGLECSWRKDAIDWICKVHSYYNFGPLSLYLAVNYLDRFLSSFNLPHDESWMQQLLSVSCLSLATKMEETVVPLPMDLQVFDAEYVFEARHIKRMELIVMKTLKWRLQAVTPFSFIGYFLDKFNEGKPPSYTLASWCSDLTVGTLKDSRFLSFRPSEIAAAVVLAVLAENQFLVFNSALGESEIPVNKEMVMRCYELMVEKALVKKIRNSNASSSVPHSPITVLDAACFSFRSDDTTLGSSQSNSNNKDYNSQDSAPASKRRRLNTTPI

SEQ ID NO: 28331 - protein, 322 aa, Oryza sativa
GLQEFGTRLRSSHPDPTAAAPACASSGGILAVSGHLAGRRAPANNVHLALFSRALQILAQQEPVRLQKLSAPDSGIVEMRLERPEARNAIGREMLQGLRSAIEKVKADATANVVLLASSVPKVFCAGADLKERRLMSPCEVREFVNSLRSTFLSFEALSIPTIAIVEGAAFGGGLELALSCDLRICGENATFSLPETGLAIIPGAGGTQRLPRIVGKSRAKELIFTGRRFDAVEAVTMGVVNYCVPAGEAYKRALELAQEINQKGPLAIRMAKKAINQGMEVDLSAGLAVEEECYEQVLHTQDRLEGLAAFAEKRKPVYTGK

SEQ ID NO: 28332 - protein, 139 aa, Zea mays
  misc_feature (83)..(83): Xaa can be any naturally occurring amino acid
  misc_feature (96)..(96): Xaa can be any naturally occurring amino acid
  misc_feature (129)..(129): Xaa can be any naturally occurring amino acid
LAYLDAGRCIDIVVHNPAPGPDGEDDAVHVPVICRLSRCNHRDIVPVREGVRHARLPQIHTLIVTSVIHMQHKLRKTPDHVVXLAREMEHYARSSXCTDAAFSHEDAGRPHRELSDHNLGEVIKAGATXTVNIPDTVGY

SEQ ID NO: 28333 - protein, 181 aa, Glycine max
MAAFTCTSRPPVSLRSESRIASSPSASLSARRMFAVSPDSAGLRIRLSQSPSSLTSKVPRPRRGIVCEAQETTTDIVSIVNDTTWDSLVLKADGPVLVDFWAPWCGPCKMIDPLVNELAKEYTGKVKFYKLNTDDSPSTPSKYNVRSIPTIMIFVNGEKKDAIIGAVPRSTLASSIDKFLQ

SEQ ID NO: 28334 - protein, 412 aa, Glycine max
MNALAATNRNFQRAARILGLDSKLEKSLLIPFREVKVECTIPKDDGTLVSYVGFRIQHDNARGPMKGGIRYHPEVDPDEVNALAQLMTWKTAVADIPYGGAKGGIGCNPRDLSISELERLTRVFTQKIHDLIGIQKDVPAPDMGTNAQTMAWILDEYSKFHGHSPAVVTGKPIDLGGSLGREAATGLGVVFATEALFAEYGKSISDHTFVIQGFGNVGTWAAKSIFERGGKVIAVSDISGAIKNLNGIDILALLKHKDGNGGVLKDFPGAEAMDPDELLVHECDVLVPCALGGVLNKENAADVKAKFIIEAANHPTDPDADGILSKKGVIILPDIYANAGGVTVSYFEWVQNIQGFMWDEEKVNRELKKYMTKAFQDIKAMCKIHNCDLRMGAFTLGVNRVARATLLRGWEA

SEQ ID NO: 28335 - protein, 338 aa, Mycobacterium tuberculosis CDC1551
MQEAPHRVMPLVRPCPRPSDPGEYVRPMTANDNKTRKWSAADVPDQSGRVVVVTGANTGIGYHTAAVFADRGAHVVLAVRNLEKGNAARARIMAARPGAHVTLQQLDLCSLDSVRAAADALRTAYPRIDVLINNAGVMWTPKQVTKDGFELQFGTNHLGHFALTGLVLDHMLPVPGSRVVTVSSQGHRIHAAIHFDDLQWERRYNRVAAYGQAKLANLLFTYELQRRLGEAGKSTIAVAAHPGGSNTELTRNLPRLIRPVATVLGPLLFQSPEMGALPTLRAATDPTTQGGQYYGPDGFGEQRGHPKVVQSSAQSHDKDLQRRLWTVSEELTGVSFGV

SEQ ID NO: 28336 - protein, 964 aa, Leptospira interrogans serovar Copenhageni str. Fiocruz L1-130
MNSTLQNQTKTNLEKVGTDPLDTFPRRHIGPNLQQTAEMLKELGLSSVEELIDKAVPVGIRLKKSLDLPKASTEHKILQNLKGIASQNQVFRSYIGAGYHSCIIPGVIQRNILENPGWYTAYTPYQAEISQGRLEALLNFQTMIIDLTGLEISNASLLDEGTAAAEAMFLAYSVRKNETAKKFFVSELCHPQTIDVVVTRANPLGIEVQIGNHESIELNEDFFGVLLQYPATDGKIIDYTSFIQRSHNVGAISTVAADLLALTLLKSPGEMGADIAVGSSQRFGLPLGFGGPHAGYFATKDEFKRSMPGRLIGVSKDSQGNSGLRLSLQTREQHIRRDKATSNICTAQVLLAVISSMYAVYHGPEGLKNIATRIYKFTSIFANVLKNAGFSITNEFFFDTITIQAGTKVQEILNRAYSKKINFREYKDGKIGITLDETVNLEDLKDLLEIFEIKNTDIEKLFVDVSNVPDSFKRKTSYLTHPVFQSHHTETKMLRYIRKLESRDLSLTTSMIPLGSCTMKLNATTEMYPVTWPEFGAIHPFAPADQTKGYKIIFEQLEKWLCEITGFAGVSLQPNAGSQGEYAGLLAIRRYHESRNESYRNVCLIPISAHGTNPASAAMAGFQVVVVSCDPNGNVDLEDLKAKAEEHKKDLAALMITYPSTHGVFEESVKEICQIVHSCGGQVYMDGANMNAQVGLTSPGEIGADVCHLNLHKTFCIPHGGGGPGVGPIGVAKHLVPFLPGHVLVDNATGNEHGAVSAAPWGSASIVLISWVYIALMGSEGLTNATRNSILNANYIAKRLEKVYPVLYKGKNGFVAHECILDLRPFKKSAGIEVEDVAKRLIDYGFHAPTMSFPVPGTLMIEPTESESLEELDRFCEAMLLIYQEILDVQSGTLDKTDNPLKNSPHTAAMVTSDRWDHLYPRERAAYPASWLKDHKFWPYVGRVDNVYGDRNLVCSCLPIESYQ

SEQ ID NO: 28337 - protein, 379 aa, Kluyveromyces lactis NRRL Y-1140
MSNIDGKLPDILSDAVLKQSVPVPDNFVKVEGIDYSKPESRNMRSKDLIKSMATMGFQASSLGKACDIIDEMRSWRGEHRDKLEEHDRKGSFDNDGYQKTTIFMGYTSNLISSGLRETLRFLVQNKMVDAIVATAGGVEEDIIKCLADTYLGEFSLPGKGLRDQGMNRIGNLLVPNDNYCKFEEWIVPILDKMLEEQENYVESQGKDCLDSNFDQDSPVWTPSKLIRRLGKEINDESSVLYWAYKNDIPIFCPAVTDGSIGDMLFFHTFKASPKQLRLDIVSDIRKINSMSMEASRAGMIILGGGLIKHHIANACLMRNGADYAVYINTGQEFDGSDAGARPDEAVSWGKIKADAKSVKVYADATVVFPLVVAATFASE

SEQ ID NO: 28338 - protein, 344 aa, Mycobacterium tuberculosis CDC1551
MQFDAVLLLSFGGPEGPEQVRPFLENVTRGRGVPAERLDAVAEHYLHFGGVSPINGINRTLIAELEAQQELPVYFGNRNWEPYVEDAVTAMRDNGVRRAAVFATSAWSGYSSCTQYVEDIARARRAAGRDAPELVKLRPYFDHPLFVEMFADAITAAAATVRGDARLVFTAHSIPTAADRRCGPNLYSRQVAYATRLVAAAAGYCDFDLAWQSRSGPPQVPWLEPDVTDQLTGLAGAGINAVIVCPIGFVADHIEVVWDLDHELRLQAEAAGIAYARASTPNADPRFARLARGLIDELRYGRIPARVSGPDPVPGCLSSINGQPCRPPHCVASVSPARPSAGSP

SEQ ID NO: 28339 - protein, 94 aa, Schizosaccharomyces pombe
MTKRTKKVGVTGKYGVRYGASLRRDVRKIEVQQHSRYQCPFCGRNTVKRTAAGIWCCNGKGCKKVLAGGAWTVTTAAATSARSTIRRLREMVEV

SEQ ID NO: 28340 - protein, 437 aa, Kluyveromyces lactis NRRL Y-1140
MEQNSVLSLHQIKRCLTVDLCCNIFTSFTTLISSHLIALLFNLENFQLTNTKSNKGTARKSAHRTPSAVPDIVISLLGTMSDVISVINRNEFWSNGRLEQDEYESDSSSGSEQEHDIEMSGAHDSNGGIDHQDGSIVTPGELITDDPIWMKGHGTYFLENKTYSSVVGTVSRVNRLLSVLPLKSRYIPETGDHIVGRITDVGNRRWKVDIGAKQYAVLMLGSVNLPGGVLRRKSETDELQMRNFLKEGDLLNAEVQSLFQDGSASLHTRSLKYGKLRNGTFVQVPSSLIVRSKNHTHNLPGNVTIILGVNGFVWIRKSSKMDLSGKTTTTGSGQSDHLPGSNNAMSVSITRLEEESSWEIYSDKNDTVTVSVRQTITRYANVIKALAHCELGITEPRIISAYEASMAYGNLGQLIESETMESLGQDVINSEKMRGAA

SEQ ID NO: 28341 - protein, 295 aa, Schizosaccharomyces pombe
MSTVYKLKTSERAPKNEDEDEEYVPVQNGQGNKHSAGFVPIKQKVLVLSSRGVTYRQRHLLNDLVSMMPHSKKDSKLDSKDRLYQLNELAELYNCNNIFFFESRRREDLYLHIARAPNGPTVKFHVENLHTMDELNMTGNALKGSRPILSFDKTFDTAPHLKVVKELLQQTFGIPKGARRSKPFIDRVCTLTIADGKIWFRNYEIRENEDKSKDPVTLIEIGPRFVMTIINILEGSFGGPVIYKNDTFVSSTMVRAAIRNQAAQRYVNRQESKLERQVRAQQNVIPEDPLDNVFA

SEQ ID NO: 28342 - protein, 494 aa, Bradyrhizobium japonicum USDA 110
MPTPILDFDALAQTISGRTVLCIGDIMLDEFVYGEVSRISPEAPTPVIVAQRSEIHIGGAGNVARNVASLGARCIFVGLVGEDDAGKRLAAALADQAAIESVLVCDPSRPTTRKVRFVSEHFSTHMLRADWEQAQPASDEVEAKLIEAILPQIARADIVLLSDYAKGVLTARVIRHTIDAARKLGKPVIVDPKSLNWAIYRGATLLTPNRKEFAEATRSRADTPQSIVDASEDVMRLADCEAILVTQGEHGMTLVPRNGAAVHVPAVPVKVRDVSGAGDTVAAALAVSLAAGADWDTALRVANAAASVAVSKLGTAIVSTAELRRKILPHAYLAAEEKIVLEPAALDAQLAEWRTQGLRVGFTNGCFDILHPGHVKVLTAARGACDRLVVGLNSDASVRRLKGADRPVQDERARAEVLAALEAVDLVVIFEEDTPIDLITRIKPAALVKGGDYTREQVVGHEVVEAAGGVVVLVDILQGFSTTALVHRARGGAK

SEQ ID NO: 28343 - protein, 548 aa, Marchantia polymorpha
MGNCVGGHSDRKNALNPNEPAATNVQRGTGAPQGSHGGSGAAGVSAQASHPAPLGGISAKQKPTLTGNVLGRPLEDVRSIYTLGRELGRGQFGVTHLCTHKVTGELLACKSIAKRKLTNKDDVEDVRREVQIMHHLEGQKNIVELKGAYEDKHNVHLVMELCAGGELFDRIIQRGHYSERAAAALCRTIVQVVQTCHSLGVMHRDLKPENFLLANKKEDAPLKATDFGLSVFFKPGEVFTDIVGSAYYVAPEVLRRNYGPEADVWSAGVILYILLCGVPPFWAETEQGIFDAVMHGHIDFTSDPWPSISQKAKDLVKRMLKQNPKERLTAHEVLSHPWISVDGEAPDKPLDNAVLSRLKQFTAMNKLKKLALKVIAESLSEEEIMGLKEMFKSMDTDNSGTITFEELKDGLQKQGSNLAESEVRQLMAAADVDGDGTIDYLEFITATMHLNKIDKEDHLYAAFQHFDGDNSGFITMEELEQALIKHGMGDPDTLKEIIREVDTDHDGRINYDEFVAMMRKGTPGHQEGHRRSISNMAPVGAPRQHHHK

SEQ ID NO: 28344 - protein, 880 aa, Mannheimia succiniciproducens MBEL55E
MTEEYLMMRNNINMLGRFLGETIQEAQGDDILELIENIRVLSRNSRSGDDKARAALLDTLSTISADNIIPVARAFSQFLNLTNVAEQYQTMSRSHEDKVSAERSTAALFARLKEQHVSQEEIIKTVQKLLIEIVLTAHPTEVTRRSLMHKQVEINKCLAQLDHTDLTAEEQKNIEYKLLRLIAEAWHTNEIRTNRPTPLEEAKWGFAVIENSLWEGLPAFIRKLNDAAVEHLNYALPVDLTPVRFSSWMGGDRDGNPFVTAKITREALQLARWKAADLFLTDIQELCDELSMTQCTAEFREKYGDHLEPYRVVVKDLRSKLKNTLDYYNDILAGRIPPFKQDEIISEDQQLWQPLYDCYQSLTACGMRIIANGLLLDTLRRVRCFGVTLLRLDIRQESTRHSDAIGEITRYIGLGDYSQWTEDDKQAFLIRELSSRRPLIPHNWTPSEHTREILDTCKVIAKQPEGVISCYIISMARTASDVLAVHLLLKEAGISYHLPVVPLFETLDDLDASKEVMTQLFNVGWYRGVIKNRQMIMIGYSDSAKDAGMMAASWAQYRAQDALVKLCEQTGIELTLFHGRGGTVGRGGAPAHAALLSQPPRSLKNGLRVTEQGEMIRFKLGLPAIAAESLDLYASAILEANLLPPPEPKASWCRVMDELAVASCEIYRNVVRGDKDFVPYFRSATPEQELAKLPLGSRPAKRNPNGGVESLRAIPWIFAWMQNRLMLPAWLGAGASIRQAMESGKAAVIEEMCNHWPFFNTRIGMLEMVFSKTDSWLSEYYDQRLVKKELWYLGESLRKQLSEDIATVLRLSGKGDQLMSDLPWVAESIALRNVYTDPLNLLQVELLRRLRADPEHPNPDIEQALMITITGIAAGMRNTG

SEQ ID NO: 28345 - protein, 105 aa, Arabidopsis thaliana
MDPLLWDQLASHSTAFAVEQFSDGVGYSWIDGLKDHAAQNVNDKMMSNAGHIFPHNTPNTKEAYYYRMIFERFFPQNSARLTVPGGATVACSTAKAEDQLAFHST

SEQ ID NO: 28346 - protein, 548 aa, Marchantia polymorpha
MGNCVGGHSDRKNALNPNEPAATNVQRGTGAPQGSHGGSGAAGVSAQASHPAPLGGISAKQKPTLTGNVLGRPLEDVRSIYTLGRELGRGQFGVTHLCTHKVTGELLACKSIAKRKLTNKDDVEDVRREVQIMHHLEGQKNIVELKGAYEDKHNVHLVMELCAGGELFDRIIQRGHYSERAAAALCRTIVQVVQTCHSLGVMHRDLKPENFLLANKKEDAPLKATDFGLSVFFKPGEVFTDIVGSAYYVAPEVLRRNYGPEADVWSAGVILYILLCGVPPFWAETEQGIFDAVMHGHIDFTSDPWPSISQKAKDLVKRMLKQNPKERLTAHEVLSHPWISVDGEAPDKPLDNAVLSRLKQFTAMNKLKKLALKVIAESLSEEEIMGLKEMFKSMDTDNSGTITFEELKDGLQKQGSNLAESEVRQLMAAADVDGNGTIDYLEFITATMHLNKIEKEDHLYAAFQHFDEDSSGFITMEELEQALIKHGMGDPDTLKEIIREVDTDHDGRINYDEFVAMMRKGTPGHQEGHRRSISNMAPVGAPRQHHHK

SEQ ID NO: 28347 - protein, 596 aa, Silicibacter pomeroyi DSS-3
MYQSFEVTARPEQGPPRLEQLRAQMRAEGLSGFLVPRADAHQGEYVAAHDERLAWLTGFTGSAGFCAVLMDVAGVFIDGRYRTQVKAQVADVYTPVPWPDVTLTAWLKEQLPQGGRVGFDPWLHAAGQIRTATGELKGSGIELVPCDNLVDRIWQDQPPPPMEAVKAHPMEFAGESAPDKAARLAEDLRKAGQQAAVITLPDSIMWLLNIRGADIPRNPVAHGFAILHADGRVDLFMAAQKLTGLGDHLDASVTQHEPDGFLDAVAALTGPVRVDLNTLPQIVADRLGDRMSDGGDPCALPKARKNAAEIAGAAEAHLRDGAAMVELLAWLDAQAPGSLTETQVVTRLEQCRRRDNGLQEISFETISGTGPNGAIMHYRVTEETDSRLENGHLLVLDSGGQYLDGTTDVTRTIAIGAVGDEEKACFTRVLKGMIAMSMLRWPVGLAGRDIECVARLPLWLAGQDFNHGVGHGVGAYLSVHEGPQRLARTSHVPLEPGMILSNEPGYYREGAFGIRIENLVVVQEAAPLPGGDGERAMLDWRTLTYVPIDRRLIVADMLTAEERRWLNAYHADVAAKIGPRLGAETRMWLDAATAPL

SEQ ID NO: 28348 - protein, 454 aa, Novosphingobium aromaticivorans DSM 12444
MSDPVIVWFRRDLRLADQAALLAAAAEGPVIPVYILDDDTPRHCRMGGASRWWLHHSLAELDASLRKLGSRLILRRGKCHEELAAVRREAGARVVHALQHYEPWWRNAEKAVAKTIRLVLHEGNYLAPAGSVRTGMGRPYKIYTPFWHALLERMPPAPPLPAPERLEAPAVWPTSDALDDWKLLPTAPDWAGGFRETWTPGENGAEERLQDFADRVARYGETRNLPSIEGTSRLSPHLHFGEISPATIWHRVVNAGGSVDVFLGELGWRDYAQNVIVQFPDYGSRNAREAYDRLEWRDDPEALRAWQQGRTGYPIVDAGMRELWHTGWMHNRVRMIAASFLVKHLLIDWREGERWFWDTLVDADYASNAVNWQWTAGTGVDSNMFVRIMAPLTQSPKFDAAGYIRQWVPELAHLSDRDIHDPAVPPRGYPAKIVSHSEARARALAAHDRMKQPA

SEQ ID NO: 28349 - protein, 136 aa, Triticum aestivum
VQHPTLGNYFTAALDAKLVGQTNDSVKLATFFWLMPHKVAAGIYWEAFRLWLKNVRFLDHPRYLSGSYRSEALKRDLEIRSSCSFLHQKPRESIGRSGTATTDETTENSNHQDYKDGRGSIGVRWCVWRNAQWPWC

SEQ ID NO: 28350 - protein, 345 aa, Bradyrhizobium japonicum
MSTAAPNETTQPTVRSGQKRVGVLLVNLGTPDTADAPGVRVYLKEFLSDARVIEDQGLVWKVVLNGIILRSRPRSKALDYQKIWNNEKNESPLKTITRSQSDKLAAALSDRDHVVVDWAMRYGNPSIKSGIDALIAEGCDRILAVPLYPQYSASTSATVCDEVFRVLARLRAQPTLRVTPPYYEDEAYIEALAVSIETHLATLPFKPELIVASFHGMPKSYVDKGDPYQEHCIATTEALRRRLGVDASKLLLTFQSRFGNDEWLQPYTDKTMERLAKEGVRRIAVVTPGFAADCLETLEEIAQENAEIFKHNGGEQFSAIPCLNDSEPGMDVIRTLVLRELQGWI

SEQ ID NO: 28351 - protein, 363 aa, Shewanella oneidensis MR-1
MLTLIIIVLVAVTVSFLCSVFEAVLLSVTPSYIATLDQTDSAAAARLRKLKENIEAPLVSILTLNTVAHTVGAAVAGAQAAKVFGDDMLGVFSGVLTFIILFFSEIIPKSVGANHWRRLAPSVSIAITWMKRATLPLIWMSQQVTRLLGKGEEGQYIRQEMSAMAKIGQESGELDEQESKILTQMLKVRDVPVTAIMTPRTVMFSLPISLTQNEFVQEYRDKPFTRIPVYDQDHDDVIGYITRTDVLLAERYTPNAPIGELKRSLFVVPETAKILPLFERMIKRNTQIAMVVDEYGSSQGIVTQEDIIESLLGLEIVDVNDPATDMQQLARKLWTKRMKQKGIRLSDDGDFEAAAEDDEARSG

SEQ ID NO: 28352 - protein, 877 aa, Staphylococcus aureus subsp. aureus Mu50
MKKRIDYLSNKQNKYSIRRFTVGTTSVIVGATILFGIGNHQAQASEQSNDTTQSSKNNASADSEKNNMIETPQLNTTANDTSDISANTNSANVDSTTKPMSTQTSNTTTTEPASTNETPQPTAIKNQATAAKMQDQTVPQEANSQVDNKTTNDANSIATNSELKNSQTLDLPQSSPQTISNAQGTSKPSVRTRAVRSLAVAEPVVNAADAKGTNVNDKVTASNFKLEKTTFDPNQSGNTFMAANFTVTDKVKSGDYFTAKLPDSLTGNGDVDYSNSNNTMPIADIKSTNGDVVAKATYDILTKTYTFVFTDYVNNKENINGQFSLPLFTDRAKAPKSGTYDANINIADEMFNNKITYNYSSPIAGIDKPNGANISSQIIGVDTASGQNTYKQTVFVNPKQRVLGNTWVYIKGYQDKIEESSGKVSATDTKLRIFEVNDTSKLSDSYYADPNDSNLKEVTDQFKNRIYYEHPNVASIKFGDITKTYVVLVEGHYDNTGKNLKTQVIQENVDPVTNRDYSIFGWNNENVVRYGGGSADGDSAVNPKDPTPGPPVDPEPSPDPEPEPTPDPEPSPDPEPEPSPDPDPDSDSDSDSGSDSDSGSDSDSESDSDSDSDSDSDSDSDSESDSDSESDSDSDSDSDSDSDSDSESDSDSDSDSDSDSDSDSESDSDSESDSESDSDSDSDSDSDSDSDSDSDSDSDSDSDSDSDSDSDSESDSDSDSDSDSDSDSDSDSDSDSDSDSDSDSDSDSDSDSDSDSDSDSDSDSDSDSDSDSDSDSDSDSDSDSDSDSDSDSDSDSDSDSDSDSRVTPPNNEQKAPSNPKGEVNHSNKVSKQHKTDALPETGDKSENTNATLFGAMMALLGSLLLFRKRKQDHKEKA

SEQ ID NO: 28353 - protein, 429 aa, Parvularcula bermudensis HTCC2503
MREEASAAAALTTRRDDRLVMKFGGTSVKSIDRIERVARHVMAGRAAGYKVCVNVSAMAGETDRLVDLATSAFGNKAARMAEYDTVVSTGEQVTAGLLSLVLQRHGIAARSWLGWQLPFQTDARHGAATIHEIDTSSLGDSLEAGEVAVVAGFQGIDEEGRITTLGRGGSDTSAVALAIALNAGRCDIYTDVDGVYTSDPRIVPSARRLDQISYEEMLEMASLGAKVLQTRSVGLAMRYGVPLRVLSSLGEPGESKVFTQIMSEQEIMERRVVSAVVPSRSEARVDLLGVPDKPGVSAMIFTALAAAKVNIDMIIQSQSRDSASVNLSFTLKEQDLSIAQSVLAERKSDIGYTEILADQNVAKVSIIGVGMNDRSGVAAQMFETLSSRGINILNISTSEIKISVLVSSEYTELAVRALHDSFGLRQSSA

SEQ ID NO: 28354 - protein, 282 aa, Aspergillus oryzae
MAPPERAGKSVFLGNIPYNLTEEQVKDILSSAGTVTKFRLMMNPETGKPKGYGFADFADADAAASAVRNLNDYEVMGRKIRVDWPHNNEKDSIPPDYSQTTQVPGQDGQMGAQQSSAPLPPLPPGVDLPPHLDCPNAISQTLSSLPPNQLLDVLSQMKSLVMADPARATELLRQAPQLAYAIFQALLLMNLVDYSTLGTVVEQAAQPQSAAAAPPAAQPFQPFSAVPGPVSTPPQPQQQMPGQDELLQQVLSMPQSAIDALPPMERSQIMLLRQQLMQGAMR

SEQ ID NO: 28355 - protein, 76 aa, Brassica napus
MEKSVPISKKLWNLVRFVMYMLHKGISKQKLLADFNATLKRGKNLMFNNRRRVPATASTVSSQPQKEYEFSCSDTP

SEQ ID NO: 28356 - protein, 102 aa, Chlamydophila abortus S26/3
MVKVVSAENFNSFIASGLVLIDFFAEWCGPCKMLAPVLESLATEVPSVLIGKVNIDDSPAPAEQYGVSSIPTLILFKDGKEVDRTVGLKDKDALIKLINQHA

SEQ ID NO: 28357 - protein, 138 aa, Shorea curtisii
EKNIPVLLGLLSIWNVSFLGYPARAILPYSQALEKFAPHIQQVSMESNGKGVSIDGVPLPYEAGEIDFGEPGTNGQHSFYQLIHQGCVIPCDFIGSAKSQQPIHLKGEVVSNHDELMSNFFAQPDALAFGKTPEELHK

SEQ ID NO: 28358 - protein, 407 aa, Ehrlichia ruminantium str. Gardel
MGWFYGVKGILFMVDGRKPHINVGTIGHVDHGKTTLTAALTTVLAKRLSGEGNKSVKYDEIDKAPEEKARGITISTAHVEYETENRHYAHVDCPGHADYIKNMITGAAQMDAAILVVSATDGAMPQTREHILLAKQVGVKDIVVWMNKCDVVDDEEMLSLVEMEIRELLTKYGYPGDDIDVVKGSAVKALEEESADGVWSEKIMELMNALEKIDLPIREKDKPFLMSIEDVFSIPGRGTVVTGRIERGVIKVGDKIDIVGLRDIQSTVCTGVEMFHKALDAGEAGDNAGILLRGIKKEDVERGQVLSAPGQIHSYKGFKAEVYVLKKEEGGRHTPFFSNYQPQFYVRTTDVTGNIKLPDGVEMVMPGDNISIEVNLDKPVAIDKGLRFAIREGGRTIGSGIITEILE

SEQ ID NO: 28359 - protein, 415 aa, Zea mays
  misc_feature (131)..(131): Xaa can be any naturally occurring amino acid
MVEGPNFAGLIGGHDNGGNFCDMAYYRKLGEGSNMSIDSLNSMQTSTHGGSIAMSVDNSSVGSCSSHTRMLNHPGLKGPVVGNYSVGGHSIFRHGRVSHALSDDALAQALMDPRYPTETLKDYEEWTIDLXKLPHGNALCHRAAFGKLYRGTYNGEDVAIKLLERPEADPERAGLMEQQFVQEVMMLATLRHQNIVKFIGACRKPVVWCIVTEYAKGGSVRQFLAKRQNRSVPLKLAVKQALDVARGMAYVHGLGFIHRDLKSDNLLISGDKSIKIADFGVARIEVKTEGMTPETGTYRWMAPEMIQHRPYDQKVDVYSFGIVLWELITGMLPFANMTAVQAAFAVVNKGVRPAIPQDCLPTLAEIMTRCWDPNPDVRPPFTEVVRMLEHAEMEILSTVRKARFRCCMSQPMTTD

SEQ ID NO: 28360 - protein, 338 aa, Xylella fastidiosa 9a5c
MHGFYSGVCAVISCAPKLDCRVCPSSGEPLTLYRSDMSPLIHHHQLIEESLGMSDKSHVFDVTDADFETAVLKKSLETPVLVDFWAPWCAPCRSLIPILEKLVAEYRGGFELAKINVDQEQQVAAALQVRSVPMVYLVKDGQLVDGFPGAKPESQVREFLTKHGILPARSAAFGEDTPAIPLDPEAEVARLRQALAAEPENNDLKLDLALALLKTNVADEAAGLIDALPAKLATDDRMLRAKAWLRFIEVLNGVPSLDVLQAACAADASDFDQRHLLGVHLLLDGQCEVALEHFLEMLRQNRDFKDGLPRKALIDAFYLIEDKELVGRYRRKMSALLF

SEQ ID NO: 28361 - protein, 370 aa, Brucella suis 1330
MASRKLLLLPGDGIGPEAMAEVRKVIAFLNSDLNLGFETEEGLVGGCAYDAHGQAISDADMEKALAADAVLFGAVGGPKWDSVPYEVRPEAGLLRLRKDMQLYANLRPAICYPALAHSSSLKPEVIEGLDILILRELTGGVYFGEPKEIIDLGNGQKRGIDTQVYDTYEIERIADVAFELARTRRNKVTSMEKRNVMKSGVLWNQVVTARHKEKHADVQLEHMLADAGGMQLVRWPKQFDVILTDNLFGDLLSDVAAMLTGSLGMLPSASLGAADSKTGKRKALYEPVHGSAPDIAGKGIANPIAMIASLAMCLRYSFGLVAEADRLEAAIAGVLDDGIRTADIWSEGNTKVGTTEMGDAILAKFKALSA

SEQ ID NO: 28362 - protein, 243 aa, Mycobacterium tuberculosis CDC1551
MLTQTLTPAIYRTTISHCRQVPVHHSFAYRSYSWYVDVDNLPQLPWWLRPFARFHADDHFADPFSCPPHSSLRDRLDAFFAARGLAVPDGRITALLQARVLGYVFNPLSIFWCHDRDGQLRHVIAEVHNTYGGRHAYLLPPADLPVVTAKNFYVSPFHQLAGYYLIRAPRPDRELDVTVTLHRDRRQVCPEFTATLRGQRRPATTRQIAMMQIISPLAPMVVAARIRIQGIRLWLRRVPVVPR

SEQ ID NO: 28363 - protein, 950 aa, Arabidopsis thaliana
MINLEKEAKEKQILIRDGKRKIVHHVNTTLLVKIYEASAIDDRHLFLKPYYGPPNYYFIKAWLDDTKEYGTYVVKDSFKVNQPPLKIPLNFPAQYLYVELLKGMSYRDPGTSNRTVVMGRAKIRLSPLMTSYKERPISGGIDLVGLNSDQCVVKKVTAAYHPTDVFLFNCGDTSNNVDNSGRNWTVESRQILSSNLVNASFTSEASYQKAGVSRIPYMKARIFRSEFTYSFPVTPGSIFLRLYFYPTQYKSGFDAVNSFFSVKVNGFTLLRNFNADSTVQASIPLSNSLIKEFIIPVHQTLNLTFTPSKNLLAFVNGIEIVSMPDRFYSKGGFDNVLRNVSSDVDFQIDNSTAFESVHRLNVGGQIVNEVDDSGMFRRWLSDDSFGNSGSIVNVPGVKINYTEKTPAYVAPYDVYATSRLMGNSSNLMFNLTGMFLTVDAGYNYLVRLHFCETLPQVTKAGQRVFSIFVEDKMAKKETDVIRLSGGPRIPMYLDFSVYVGFESGMIQPELRLDLVPLKDTNQTYYDAILSGVEILKLNDSDGNLARPNPELLVSTDSTPDDSNVTPPIKGKPHVLVIILIVVGSVIGLATFIVIIMLLIRQMKRKKNKKENSVIMFKLLLKQYIYAELKKITKSFSHTVGKGGFGTVYRGNLSNGRTVAVKVLKDLKGNGDDFINEVTSMSQTSHVNIVSLLGFCYEGSKRAIISEFLEHGSLDQFISRNKSLTPNVTTLYGIALGIARGLEYLHYGCKTRIVHFDIKPQNILLDDNFCPKVADFGLAKLCEKRESILSLIDTRGTIGYIAPEVVSRMYGGISHKSDVYSYGMLVLDMIGARNKVETTTCNGSTAYFPDWIYKDLENGDQTWIIGDEINEEDNKIVKKMILVSLWCIRPCPSDRPPMNKVVEMIEGSLDALELPPKPSRHISTELVLESSSLSDGQEAEKQTQTLDSTII

SEQ ID NO: 28364 - protein, 335 aa, Oceanospirillum sp. MED92
MYEIPGFTDEHHIPSAIAVLTSGGDSPGMNPAIRGVVRAALHRGIKVFGINKGYSGLIIGDLEEMNSASVTNIVQRGGTILKSDRCEAFKDPAVRHQAAEVLKEKGIDTLVVIGGDGSLTGAHYLTLENDIRVIGLPGTIDNDIYGTDDTIGFDTAVNTALEAIDKIRDTALSHESLFLVEVMGRNSGFIATHVGIACGAEMIVIPEYEVKVDAISSQLASNREQGKGSSGIIVVAEGPKPGLTYDLAKQLKNHGQQPKVCILGHIQRGGIPSGHDRILASCLGASAVDYLCAGYNDIMIGVRRGKIVDTPLAQVIEKSKELDEALFQRALLLHK

SEQ ID NO: 28365 - protein, 95 aa, Idiomarina baltica OS145
MQINLTGHHIDITDALREYVDTKFAKLERHFDHINNVHVILNVEKTIQKAEATLHVNGGEIFADAEHEDMYAAIDGLINKLDRQVIKHKEKLKKH

SEQ ID NO: 28366 - protein, 677 aa, Bacillus subtilis
MKKRLIQVMIMFTLLLTMAFSADAADSSYYDEDYRPQYHFTPEANWMNDPNGMVYYAGEYHLFYQYHPYGLQWGPMHWGHAVSKDLVTWEHLPVALYPDEKGTIFSGSAVVDKNNTSGFQTGKEKPLVAIYTQDREGHQVQSIAYSNDKGRTWTKYAGNPVIPNPGKKDFRDPKVFWYEKEKKWVMVLAAGDRILIYTSKNLKQWTYASEFGQDQGSHGGVWECPDLFELPVDGNPNQKKWVMQVSVGNGAVSGGSGMQYFVGDFDGTHFKNENPPNKVLWTDYGRDFYAAVSWSDIPSTDSRRLWLGWMSNWQYANDVPTSPWRSATSIPRELKLKAFTEGVRVVQTPVKELETIRGTSKKWKNLTISPASHNVLAGQSGDAYEINAEFKVSPGSAAEFGFKVRTGENQFTKVGYDRRNAKLFVDRSESGNDTFNPAFNTGKETAPLKPVNGKVKLRIFVDRSSVEVFGNDGKQVITDIILPDRSSKGLELYAANGGVKVKSLTIHPLKKVWGTTPFMSNMTGWTTVNGTWADTIEGKQGRSDGDSFILSSASGSDFTYESDITIKDGNGRGAGALMFRSDKDAKNGYLANVDAKHDLVKFFKFENGAASVIAEYKTPIDVNKKYGLKTEAEGDRFKIYLDDRLVIDAHDSVFSEGQFGLNVWDATAVFQNVTKES

SEQ ID NO: 28367 - protein, 433 aa, Arabidopsis thaliana
MRRRRCDLQPKRTRMCDLQPKRTSMCDLPPKLVGEKILTRIPITSLRAVRSTCKLWNALTKDRVLGKAAAQFLGFMTMDSKVCSVRFHLRRSKEEEEDTMDLSIKQVDLLNQVEISRVYHCDGLLLCVAKDNSRVVVWNPYLGQTRWIRPRTESNIGDSYALGYDINRNHKILRMVQTRNVSVYRYEIYDLRSNSWRVLEVTPNGEMDPNHPLYGVSVKGNTYFFAHEDSSSGEIDEDGDIIDLEDFLLCFDFTTETFGLRLPLPFHSTIDATVTLSCVRDQQLAVLYHNEGLHSDDRFTTVEFWVTTSIEPNSVSWSKFLTVDMRPLALTGVRFDNDMGATFFIDEDEKVAVVFDLDGYLSTESARYHTAFISGKDGFFKPVTLGVAPNVGEPCPRTGHIPTTYRPPLVCSSTYLPSLVQVNQQRKRKERHV

SEQ ID NO: 28368 - protein, 345 aa, Prunus persica
LDGKSFPVLFDVSKVEKKDLFTGTYMPSLELTGGYRILSYLDPSEPKHDKLKRVIFYLLKSSRDSVLPEFHSSYTELFETLESKLADKGKADFVEANDQAAFNFLARSLYRANPADTPLGLDGPKLVSKWVLFNLGPLLMLGLPKFIEDPLLHTFRLPPFLIKKDYQRLYDFFYQSSGHVLDEAERLGVSRDEACHNLLFATCFNSFGGMKILFPNMLKWIGRAGVKLHTQLAEEIRSVVRSNGGKITMGGMEQMPLMKSVVYEAFRIEPPVQLQYGKAKTDLLIESHDAAFKVKEGEMLFGFQSFATKDSKIFERAEEFVADRFVGEDGEKLLKHVLWSNGPET

SEQ ID NO: 28369 - protein, 403 aa, Vibrio fischeri ES114
MTIEILVPDLPESVADATVATWHKQPGDAVERDEILVDIETDKVVLEVPAPEAGVLETILEDEGATVLSKQLLARIKPGAVVGEPTTDVTTATESSPDKRHTASLSEESNDALSPAVRRLLGEHDIAPSDVKGTGVGGRITREDVDAHIAALKAAPKAEKAADKPAEALAHRSEKRVPMTRLRKTVANRLLEAKNSTAMLTTFNEVNMKPIMDLRKQYKDQFEERHGTRLGFMSFYVKAVTEALKRYPEVNASIDGDDIVYHNYFDISMAVSTPRGLVTPVLKDCDTLGFADIEKGIKELAIKGRDGKLAVEDLMGGNFTITNGGVFGSLMSTPIINPPQAAILGMHKIQDRPMAVDGKVEILPMMYLALSYDHRLIDGRESVGFLVTIKELLEDPARLLLDV

SEQ ID NO: 28370 - protein, 306 aa, Sulfitobacter sp. EE-36
MMDLNLSPAGAGDADLIKDTSEATFMADVVEASQTVPVIVDFWAPWCGPCKTLGPMLEDAVRAAKGAVKMVKINVDEAQQIAGQLQIQSIPTVYAFFKGQPVDGFQGALPQSEIKAFIDRVIKAGGGEAPGEELSEAVAAADDMLAEGATQDALDTFAAILGEDPNHAGAYCGMVRAYIALDQLDQAEAHLNGAPIEISKAPELEAAHAQLQLARQAADAGPVAELQAAVDANPDDMQARFDLAQALYAHGDTQAAVDQLLTLFGKDREWNDGAAKTQLFIIFEALKPNDPIALNGRRKLSSMIFA

SEQ ID NO: 28371 - protein, 290 aa, Vibrio fischeri ES114
MSVLINKDTKVICQGFTGGQGTFHSEQAIDYGTQMVGGVSPGKGGQVHLGLPVFNTVRDAVEATGATASVIYVPAPFCKDAILEAIDAGIKLIVTITEGIPTLDLLDVKVRLDAEGVVMIGPNCPGVITPDECKIGIMPGHIHKKGKVGIVSRSGTLTYEAVKQTTDEGFGQSTCVGIGGDPIPGSNFIDILKLFQEDPETEAIVMIGEIGGTAEEEAAAYIKANVTKPVVSYIAGVTAPPGKRMGHAGAIISGGKGTAEDKFAALEEAGVKTVKSLADIGKALREVTGW

SEQ ID NO: 28372 - protein, 282 aa, Glycine max
MYREAAVKKEEYQVLEELGRGRFGTVFRCFHRTSNKFYAAKLIEKRRLLNEDRRCIEMEAKAMSFLSPHPNILQIMDAFEDADSCSIVLELCQPHTLLDRIAAQGPLTEPHAASLLKQLLEAVAHCHAQGLAHRDIKPENILFDEGNKLKLSDFGSAEWLGEGSSMSGVVGTPYYVAPEVIMGREYDEKVDVWSSGVILYAMLAGFPPFYGESAPEIFESVLRANLRFPSLIFSSVSAPAKDLLRKMISRDPSNRISAHQALRHPWILTGALTTATISNFLT

SEQ ID NO: 28373 - protein, 337 aa, Mycoplasma genitalium G37
MAAKNRTIKVAINGFGRIGRLVFRSLLSKANVEVVAINDLTQPEVLAHLLKYDSAHGELKRKITVKQNILQIDRKKVYVFSEKDPQNLPWDEHDIDVVIESTGRFVSEEGASLHLKAGAKRVIISAPAKEKTIRTVVYNVNHKTISSDDKIISAASCTTNCLAPLVHVLEKNFGIVYGTMLTVHAYTADQRLQDAPHNDLRRARAAAVNIVPTTTGAAKAIGLVVPEANGKLNGMSLRVPVLTGSIVELSVVLEKSPSVEQVNQAMKRFASASFKYCEDPIVSSDVVSSEYGSIFDSKLTNIVEVDGMKLYKVYAWYDNESSYVHQLVRVVSYCAKL

SEQ ID NO: 28374 - protein, 121 aa, Triticum aestivum
MAATGEETVRASHILIKHEGSRRKASWKDPEGRVISATTRADAAARLGDLRAQILAGRGSFADLAAQHSDCSSARRGGDLGTFGRRQMQKPFEDATYALKVGEISDIIDTESGVHIILRTA

SEQ ID NO: 28375 - protein, 162 aa, Novosphingobium aromaticivorans DSM 12444
MSGPRTIADFKARKPNGEEIDLAEKKGKVLLVVNTASKCGFTPQYDGLEALWRQYGERGFEVLAFPCNQFGKQEPGTADEIESFCKVNFGLSFPLMAKIEVNGDNADPLYDWLKSEAPGVLGTKSIKWNFTKFLIDREGRVVRRYAPTDKPESIAGDIERLL

SEQ ID NO: 28376 - protein, 112 aa, Synechococcus sp. CC9605
MKKVEAIIRPFKLEDVKVALVEAGIIGMTVSEVRGFGRQKGQVERYRGSEFTVEFLQKLKIEVVVEDDRVEEVVESIADAARTGEIGDGKIFISPVESVVRIRTGDRDSTAL

SEQ ID NO: 28377 - protein, 535 aa, Neisseria meningitidis MC58
MSIVEIKVPDIGGHENVDIIAVEVKAGDTIAVDDTLITLETDKATMDVPADAAGVVKEVKVKVGDKISEGGVILTVETGAAAAEAAPAAAEAQPAPAAAPAAAGGATVQVAVPDIGGHTDVDVIAVEIKVGDTVAEDDTLITLETDKATMDVPCTAAGVVKAVFLKVGDKVSEGSAIIEVETVGSAAAAPAQAAQAAAPAAAPPPTAAAAPAAAPAPSAPAAAKIDEAAFAKAHAGPSARKLARELGVDLGQVKGTGLKGRIMGDDIKAFVKSVMQGGAAKPAAASASLGGGLDLLPWPKVDFSKFGNVEVKELSRIKKISGQNLSRNWVVIPHVTVHEEADMTELEEFRKQLNKEWEREGVKLSPLAFIIKASVSALKAFPEFNASLDGDNLVLKNYFNIGFAADTPNGLVVPVIKDVDQKGLKQISQELTELSKKAREGKLKPQEMQGACFTISSLGGIGGTGFTPIVNAPEVAILGVCKSQIKPVWNGKEFAPRLMCPLSLSFDHRVIDGAAGMRFTVFLAKLLKDFRRITL

SEQ ID NO: 28378 - protein, 487 aa, Triticum aestivum
TNQSGMAGGDEGSLVPRQVPGSYGMPFVSAIRDRLDFYYFQGQDKYFESRVEKYGSTVVRINVPPGPFMARDPRVVAVLDAKSFPVLFDVDKVEKKNLFTGTYMPSTSLTGGFRVCSYLDPSEPIHTKVKQLLFSLLASRKDAFIPAFRSHFSSLLATVESQIVLGGKSNFNTLNDATSFEFIGDAYFGVLPSASDLGTTGPTKAAKWLIFQLHPLVTLGLPMILEEPLLHTVHLPPILVSGDYKALYKYFFAAATKALDTAEGLGLKRDEACHNLLFATVFNSYGGLKVLLPGILARIAGAGEKFHQKLVAEIRAAVADAGGKVTIEALEKMELTKSAVWEALRLDPPVKFQYGRAKADMNIESHDAVFAVKKGEMLFGYQPCATRDPRVFGSTAREFVGDRFVGEEGRKLLQYVYWSNGRETESPSVDNKQCPGKNLVVLVGRLLVVELFLRYDTFTADVGVDLLGTKVEFTGVTKATSGPESAV

SEQ ID NO: 28379 - protein, 541 aa, Candidatus Kuenenia stuttgartiensis
MAHHFKNAEECWRSILSDVKGNANLLSEIKRFAEENTAPAKIVFGTSGWRGEMGTDYTFHTVRIVTTAIIEMFKNASAELLSALGAENFGDIKKRGIIVGHDNRFLGPEFANAVMGLLSKEGIKVYYTGEATTPELSASIEMVNAAGSINLTPSHNPSNYAGFKFNPADGGPAGTEITSVIERNANQLMANNKTIPAILPGDVEKIDTIKLYKDFLLRRGTLDIEKIRRFIQNEDCFICIDHVHGASRKRPASILGESNKISYLRTEDDYLFGGISPEPSARNIQPAMDMLKGRGNRFKLGVVIDPDGDRIRFTDGNRDITINHFGATALHFLHTYKNIFGVLVKSVATSNFGNAIAQKLSIPVKETAVGFKNFRPYMLQKASERAIVAYEESDGITGYNNTLEKDALFGLLIAIEMMAVTGKNISEYLCMLEEEFGAYYPERAGIEVARSLAGEPLAKKLSKLLERFKTGEEFLIGEKKKKIASVITTDGIKIVLDDNSWFLIRPSGTEPKVRFYTETRSQCEAAAMIDAVKSITKEALE

SEQ ID NO: 28380 - protein, 136 aa, Magnaporthe grisea 70-15
MTGGGKSGGKASGSKNAQSRSSKAGLAFPVGRVHRLLRKGNYAQRVGAGAPVYLAAVLEYLAAEILELAGNAARDNKKTRIIPRHLQLAIRNDEELNKLLGHVTIAQGGVLPNIHQNLLPKKTGKTAGGKNASQEM

SEQ ID NO: 28381 - protein, 489 aa, Magnetospirillum magnetotacticum MS-1
MILKDSSLLKSRAFVNGAWTDADNGATFDVLNPATGEILASVPDMGAAEARRAIEAANAAWPAWKAKTGKERGAILRNWFNLIMAHQEDLAVLLTAEQGKPLAEARGEIAYGASFIEWFAEEAKRVYGDTIPGHAPDKRIVVVKEPIGVVAAITPWNFPNAMITRKCAPALAVGCPVVVKPAEDTPLSALALAELAVRAGIPAGIFNIVTARHGALVGGELSGNPLVRKLSFTGSTQVGKLLMSQCAATVKKVSLELGGNAPFIVFDDADLDAAVAGAMASKYRNAGQTCVCANRMLVQDGVYDEFARRLAKAVSQLKVGDGLASDANQGPLINAKAVEKVERMLADAVSKGATIVCGGKRHALGRTFFEPTIVTNVTSTMSMAREEIFGPVAPLFRFKTEAEAIAMANDTEFGLAAYFYAGNIARVWRVAEKLEYGMVGINDGIISTEVAPFGGVKESGIGREGSKYGIEDFLEIKYLCLGGIKEAAQ

SEQ ID NO: 28382 - protein, 138 aa, Shorea leprosula
EKNIPVLLGLLSIWNVSFLGYPARAILPYSQALEKFAPHIQQVSMESNGKGVSIDGVPLPYEAGEIDFGEPGTNGQHSFYQLIHQGRVIPCDFIGSAKSQQPIHLKGEVVSNHDELMSHFFAQPDALAFGKTPEELHK

SEQ ID NO: 28383 - protein, 410 aa, Pseudoalteromonas tunicata D2
MENTVIELKFALDTFYFLVSGILVMWMAAGFAMLEAGLVRSKNTTEILTKNVALYAIACTMFLLVGYNIMYVNNPEGGILPTLGGLIGSQASDANHSLESDFFFQVVFVATAMSIVSGAVAERMKLWAFLAFCVVMTGFIYPLEGYWTWGGGFLSKLGFVDFAGSGIVHMAGASAALAGVLLLGARKGKYGKNGEIYPIPGSNLPLATLGTFILWMGWFGFNGGSQLLLSDAENSTAIGKIMVNTNAAAAAGAIAALFVCKILWRKADLTMVLNGALAGLVVITADPASPSPVLALLLGALGGSLVVFSIVFLDKMKIDDPVGAISVHGVCGVLGLMLVPLSNTDATVVKQLIGTVTIFSFVFIASLITWSILKSVMGIRVSEEEEINGMDQHDCGVDAYPEFVTVRSNI

SEQ ID NO: 28384 - protein, 161 aa, Polaromonas sp. JS666
MNTVYAFEARQINGQNIPLSEFSGKVMLIVNTASQCGFTPQFGGLEELHKTYAGKGLAVLGFPCNQFGSQDPGSDGEIAEFCQVNYGVSFPMMSKIDVNGPAAHPLYKWLTAEAPGLLGSKSIKWNFTKFLVGKNGQVIKRYAPTDKPAELARDIEAALAA

SEQ ID NO: 28385 - protein, 324 aa, Brucella suis 1330
MTSQDNPYGGAYGGPVSQMTANVSFGQPSAPANGGDLIKDTTTAGFQADVITESRKQPVLVDFWAPWCGPCKQLTPIIEKAVREARGAVKLVKMNIDEHPAIAGQLGIQSIPAVIAFVNGQPVDGFMGAQPETKVKEFIAKVGGPSDQEAALAEAIATAKELAQAGDFVQAAEIFSSILQVAPDNVDAVVGLATCMLEAGDAEQARSLLGTLAAEKQNEAPVRALEARLALADQVKLIGDPVELERRLAADPGDYQARFDLAQVRNAQGRRDDAANELLAIMRADRAWNDDGARKQLLQFFEAWGHMDPATLTARRKLSSLLFS

SEQ ID NO: 28386 - protein, 112 aa, Pseudoalteromonas tunicata D2
MKMISAIIKPFKLDDVREALSDLGVEGMTVVDVKGFGRQRGHTELYRGAEYQVDFIPKIKIEIATRSENLDRIVEAITKVASTGKIGDGKIFVYDLEQIVRIRTGELDEEAI

SEQ ID NO: 28387 - protein, 138 aa, Shorea leprosula
EKNIPVLLGLLSIWNVLFLGYPARAILPYSQALEKFAPHIQQLSMESNGKGVSIDGVPLPYEAGEIDFGEPGTNGQHSFYQLIHQGRVIPCDFIGSAKSQQPIHLKGEVVSNHDELMSNFFAQPDALAFGKTPEELHK

SEQ ID NO: 28388 - protein, 198 aa, Zea mays
  misc_feature (107)..(107): Xaa can be any naturally occurring amino acid
  misc_feature (157)..(157): Xaa can be any naturally occurring amino acid
VSGIPVEDCLVWDSRFLAPVPETALDDEARAAAARRIAERKARKRSEWRTYLVAAVMSSLGVTSMAVAAVYYRFSWQIEGGTVPMSEMFGTFALSVGAAVGMEFWAXWAHQALCHASLWHMHESHHRPREGPFELNDVFAIVNVVPAISLLGDVASXIHHMDMFEGVPYGLFLGPKELREVGGLDELEKELARIGQTI

SEQ ID NO: 28389 - protein, 258 aa, Ralstonia eutropha JMP134
MSYENILVETRGRVGLVTLHRPKALNALNDALMDELGAALTVFDKDENIGAIVITGSEKAFAAGADIGMMAKYSFMDVYKGDYITRNWETIRTIRKPVIAAVAGYALGGGSELAMMCDIIIAAENARFGQPEVKLGTMPGAGGTQRMPRAVSKAKAMDLCLTARMMDAAEAERAGLVSRVVPADKLLDEALAAAETIAGYSLPVVMMIKESINAAYETTLAEGVRFERRLFHATFASEDQKEGMAAFVEKRSPDFKHR

SEQ ID NO: 28390 - protein, 314 aa, Candidatus Kuenenia stuttgartiensis
MNRDYDVIIVGGGPAALAAAVYTCRALLKTVVFERKITGGQLAGTDMIENYPGFPDVISGVDLTQRMEEQAKRFGLIVRYEEVLKLTVEDGLKVVTTDTGVYASYAVILACGADPRKLDIPGENEFYGRGVSYCATCDGAFFRDKDVVVVGGGDSALTEGIFLTKYVKTVQIIHRGEAFKAAKIYQEDAFANPKIHVSFNTTVEEIHGKESVEGIITRNVVTGEKNSLPCQGIFIFIGSVPNTSFLGNLLCVDTGCHIETNMHMETEIEGVYAVGDVRKWSYRQIATSVGDGVTAAIAAEHKLAELKALGKIKN

SEQ ID NO: 28391 - protein, 112 aa, Methylococcus capsulatus str. Bath
MKFVTAILKPFKLDDVREALSEVGITGITVTEVKGFGRQKGHTELYRGAEYVVDFLPKVKLEVAITDDQLEAVIDAITKTANTGKIGDGKIFVADLEQVVRIRTGETGPDAL

SEQ ID NO: 28392 - protein, 313 aa, Ehrlichia ruminantium str. Gardel
MSRIAVVLFNLGGPQSLSEVKSFLFNLFYDKNIINLPNPLRFIIATLISHFRNKTATKIYQYLDGKSPILEATKTQATLLETVLNKHNNNQYKVFIFMRYSNPSVKETIKHVNEYNPNRIILLPLYPHYSLTTTFSAIQHWNKYTKTENLAIPTTTICSYYHNEHYIKAQCKLITEKYYEACIYGLPRILFSAHSLPLSIIQRGDPYLYQIEHSVYLIVKFLNIPSLDYKICYQSKVGPVKWLEPSTLSEINKAIQNNTPIVLVPISFVSENSETLVELDIEYKSTVPENMFFRVPTLSENEGYIKCLEEMCI

SEQ ID NO: 28393 - protein, 232 aa, Arabidopsis thaliana
MLRSSIRLLYIRRTSPLLRSLSSSSSSSSSKRFDSAKPLFNSHRIISLPISTTGAKLSRSEHSMAASSEPKSLYDFTVKDAKGNDVDLSIYKGKVLLIVNVASQCGLTNSNYTELAQLYEKYKGHGFEILAFPCNQFGNQEPGTNEEIVQFACTRFKAEYPIFDKVDVNGDKAAPVYKFLKSSKGGLFGDGIKWNFAKFLVDKDGNVVDRFAPTTSPLSIEKDVKKLLGVTA

SEQ ID NO: 28394 - protein, 139 aa, Methylococcus capsulatus str. Bath
MQLVCPACLTRNRVPADRLGEQPKCGRCSTPLLSGHPVELDDGRFDAYTRHSDLPVLVDFWATWCGPCRSLAPVVAQAADALNGRILVAKVDVDRAPATAQRFNIRSVPTLVLFRHGQETRRISGALGFGPLMDWLQRG

SEQ ID NO: 28395 - protein, 334 aa, Prosthecochloris aestuarii DSM 271
MTKVKVGINGFGRIGRLVFRQALANDKIEITAINDLCDTKTLAHLLKYDSTHGVFNAEVSVEDDKLIVNGKSILICSEKDPAQLPWKELGIDLVVESTGLFTKRAAAAKHLEAGAKKVIISAPAKDAVDATIVVGVNDDIITGEEEIISNASCTTNCLAPMAKVLEDNFGIEKGFMTTVHAVTNDQRILDLPHSDLRRARTAMSSIIPTSTGAAKAIGLVVPELAGRLDGMAMRVPVPDGSVTDLTVILKKPATKEEINAAIQAAAEGNMRGVLEFCTDPIVSQDIVGNANSCIFDSLLTMSTGTMVKVVGWYDNELGYSTRVIDLLEIYSHFV

SEQ ID NO: 28396 - protein, 102 aa, Acinetobacter baumannii
RGATGEVIQDVVNIGVGGSDLGPQMVTHALCDFKVKTAKPLNVHFVSTMDGSQLSDLLHQLRPETTLFIISSKSFGTIDTLSNAQTVRQWLEKALGKHDRVV

SEQ ID NO: 28397 - protein, 323 aa, Nostoc sp. PCC 7120
MTSVVSSARRTIRIGSRKSQLALVQTYWVREQLQNSFPDINFEVHTMSTQGDKILDVALAKIGDKGLFTKELEVGMINEEIDFAVHSLKDLPTNLPEGLALAAITERENPADALVVHENFKDKQIDTLPAGAVIGTSSLRRLAQLRNQFPHLTFKDVRGNLNTRLAKLDAGEYDGLILAAAGLQRLGMGDRVHQILPKEISLHAVGQGALGIECRADDAELITVLKAIEHPETRDRCLAERSFLRSLEGGCQVPIGVNTEINGNELILTGVVASVDGQNLVKDTVSGNASDAEAIGIRLAELLREQGAQEILNTIFAEIQRGS

SEQ ID NO: 28398 - protein, 910 aa, Desulfotalea psychrophila LSv54
MSLRNFFLALFFAVLFFFSSAIAFAGWQEAPVVLILNSYHQGFGWGDAEVEAEIDVLRENFPEMSLYIEHMDQKRFPGEEGERHTLQQLEFKFAKFSPDIIIANDNIAFAFALRLRDLLWSDIPIVFSGYNGDDRLLDSLGSGVTGVFEEIDAVGTINMALKLQPGIKHVFVVVEDTITGRAVLTNVQPKLRQFGDRLRFEYLAEKGLPEILARLRLASDESIVLLLPYATSQPGTHMDARSLADLIIETSPVPVYTPYDFHLGLGALGGYVLEGKEQGQLAAELAVKILTTGNIPAPVKEELHFSPVFDNEVLNRFSIEVSELPPGSEVINQLSLGFYEQNTTFINLIALIAILLVSLLLTLLINIHLQRNAERKFVEIFDATSEAVLVCDIDTLQVLEFNRSSELLLGAEEQLVKLTDLRWNFCGEEPYDDQAFQQLIERTVRDGSLTVDWQMKRYSGEKFWAGMTLNYMQIKDVDCLLVVIRDVEQRHQLAGELEAYKFHLEELVDQKTADLQRFQQDLITAKDEAERANQAKSTFVANMSHEIRTPLNGVLGLAQLLEKTSLSVDQRSYVRRILDSGQQLLTTVNDILDFAKMEAGRLEIEESGFSLHALLQPVIDSVFVEEESSPKFCLDVAPGIPENLIGDRFRIGQVLINLLGNALKFTKEGHVSLHVVSMGLGEKGVILKFSIIDTGVGIALDVQKQLFVPFTQADSSVTRNYGGTGLGLTICKKLVVAMGGDIGLESSPGAGSTFWFTLDLGVGQEGDAQNTEAVQVNSVDRKSLLEGLKILLVDDNEINLYMMEAILLAAGAEVTLAENGQECLERLEESSYDLILMDVQMPVLDGYETTRRIRKDEKYRALPIIAITANALSDDIEKCFEAGMNDHVAKPFKIEELDASIAKCLLASRS

SEQ ID NO: 28399 - protein, 210 aa, Salmonella enterica subsp. enterica serovar Paratyphi A str.
MLLHPSLASADPLRYAEALTALHDAPLGSLHLDIEDTSFINNITFGMKTIQAVAQYSRHPLSFHLMVSSPQRWLPWLAAIRPGWIFIHAESVQNPSEILADIRAIGAKAGLALNPATPLLPYRYLALQLDALMIMTSEPDGRGQQFIAAMCEKVSQSREHFPAAECWADGGITLRAARLLAAVGAQHLVIGRALFTTANYDVTLSQFTAL

SEQ ID NO: 28400 - protein, 326 aa, Candida albicans
SLVGRPRHQGIMVGMGQKDSYVGDEAQSKRGILTLRYPIEHGIVSNWDDMEKIWHHTFYNELRVAPEEHPVLLTEAPMNPKSNREKMTQIMFETFNVPAFYVSIQAVLSLYSSGRTTGIVLDSGDGVTHVVPIYAGFSLPHGILRIDLAGRDLTNHLSKILSERGYSFTTSAEREIVRDIKERLCYVALDFEQEMQTSSQSSAIEKSYELPDGQVITIGNERFRAPEALFRPADLGLEAAGIDQTTFNSIMKCDMDVRKELYGNIVMSGGTTMFPGIAERMQKEITALAPSSMKVKIIAPPERKYSVWIGGSILASLSTFQQMWIS

SEQ ID NO: 28401 - protein, 374 aa, Oryza sativa
MLGVARRRLGSGCALGQLMQALRPAAAAAAARTYSAAAKEMTVREALNSALDEEMSADPSVFLMGEEVGEYQGAYKISKGLLDKYGPDRVLDTPITEAGFTGIGVGAAYQGLRPVVEFMTFNFSMQAIDHIINSAAKSNYMSAGQINVPIVFRGPNGAAAGVGAQHSQCYAAWYAHVPGLKVLTPYSAEDARGLLKAAIRDPDPVVFLENELLYGESFPVSAEVLDSSFCLPIGKAKIEQEGKDVTITAFSKMVGYALQAAEILSKEGISAEVINLRSIRPLDRATINASVRKTNRLVTLEEGFPQHGVGAEICMSVVEDSFEYLDAPVERIAGADVPMPYAANLERMAVPQVEDIVRAAKRACYRAVPMAATA

SEQ ID NO: 28402 - protein, 2109 aa, Oceanospirillum sp. MED92
MPDRLHIIELLHQGKHSRISRAIIERNDADKYPVIVKQAANEQQINSAKQRLAYEFSLLSQLQLDCICRPIELRQTDKGHQILFQDIEAVTLRQWMLSDRPELVNRISAALNIAKALGKIHDAEIIHKQITPDNILIDPQSLNLWIIDFSLSSRLQREHPGSISGLSDKQNLAYISPEQTGRINRVIDYRSDYYGLGATLYELFTGATPFISDDSLELIHCHLARQPVEPYIQNTDLPEPLSQVIMKLLAKDASQRYQSSFGLCNDLNACLEMTRQQRKDHFTVGCRDISERFELPQKLYGRENVVAQLQESFDAACRGQQSLALISGYAGIGKSSVAHEMRHYITQRRGLFASGKFDQYHRNRPYTAIYQALQILIRQLLTESDEQIAQWRERLLEATGNNAQVLFRLIPELELILGKQPSAPKLSPSEEQHRFSHIIRQLLKVFATEQHPLVLFFDDLHWADLSSLKLLDKLSHNPQHPHLLVIGSYRTQNFSNNHPFNLAIEHLKKAPVKQCNVEIQPLTLNDITALVADTLGQHSETCQELAEICFSKTQGNPFFLNQFLIELYDKQLISFQGDKWVWTQQDILDCEITDNVIDFMVDKLQRLPPRTLEALKLAACIGNPIPLQILASAFKHSVPDTADALWPALKEGLLLPTANIHQYKPEGPVNNSYYRFVHDRVQQAAYSMIPDQELETLHYQIGNVLKESMSIKALGRRLFDVTNHLNQSLSLISTTAEKLELAELNLKTGIRARESAAFESAFEYFQQGLALFAGSPELRAQELKNQLFQHAAETAYIKADFEYLDRLLSDALPGIPDLHARIQLEELRIQALVAQNRFSEALETALGQLSQLKIQLPLSPKSSTITLNQVKTYLLLNRFSDERILKLPKMKDPNKLATMSLLANMFGVVKFSSSGLRPLVMAKEVELTLKHGLSNESAMAFAGYGGVLCGKNKQIELGLRLGRLALKICDRYPNNREHRVQSLYNAYIRHYAESLSLCAASLFESHLKALEYGDIEWSAYSLAAYIQYEFALTSDLGIFADQLKQYILQLNESGQIQSLHYTLMTQQCVATLIGPEPAGLNGKFYDEAAMLAEYQANNHKTAICLHFYYKAVLALIYGQHDQAEQFFAEANEYSPYISGTYTAPYLEFFSTVNSLLQFESTSVLEQSNRIKKAKKYLKKLRQFCQHSRENHLHHEMLIKALILTCEARYSSAIDFFDQAANHAESYNFNLDHALCMELTAHCYRQWKKETLYQHYIKQAAKRYAAWGASSKVRQLEESYSFLTEVQVEQRQLDTQTGSGSEPYLQHRDYDITSVIKASQAISDEIMLEPLISTLIRLAIVNAGAQRAVLLLNHEHLTISAEATIEADTRFYDDLPLNQAADILPSSIIHYVARTKENVVLGDATKHEMFQQDQYIQGFKPRSLLALPILYHSELTAILYLENNQSSNVFDRNRLETLQILAAQAAISIENAKLYQSLEQSEYDYKSLFLNAVEGIFRASPDGHFLSANPALATLLGYRSMDEFHDEITDIASQCFYVDHERVAFLEKLDTQHKILNFETRWRKKSGEPIYVSLSARKVLDASGQVQYYEGSLTDITERKAKEAAEQARHEAEAENEAKSMFLATMSHEIRTPMNGILGMAQLMKQGQLNSEQNEQIDTIYNAGQTLLSILNNILDYSKIESGQLELEEKPFLIQDVMDEIYNLFKPVAQEKSLQIVPNIERTLPAVSGDPRVLSQILMNLCSNALKFTHQGYIRISCEGLPDTQDKLKTRFTIEDTGIGIPEKAQSRIFQHFTQADSSITRRYGGTGLGLAITRQIIERLNGEIGFESTEEQGTTFWFELSFPITDELPAEVANVPMPKPSTCLDILLVEDTPVNQEVTKGLLESDGHKVSIADDGYTALSMHNDHDYDLVLMDIHLPDMDGMETTRRMREHPQEQKSAIRIIALTASVTPNEVQNYLDSGMNGVLAKPIQHADLKAILEQEGTTEVKNTATQEYLDLALLTQHREMLGEESVQQLLTQFHNQAEQLLEEIAEAIQQQDSAALQSSAHTLSGAAANFGFIQVQQAAKALEKAGSIKSDNHAELQSSCTQLNETYHDSRIELNKWTDITQ

SEQ ID NO: 28403 - protein, 326 aa, Candida dubliniensis
SLVGRPRHQGIMVGMGQKDSYVGDEAQSKRGILTLRYPIEHGIVSNWDDMEKIWHHTFYNELRVAPEEHPVLLTEAPMNPKSNREKMTQIMFETFNVPAFYVSIQAVWSLYSSGRTTGIVLDSGDGVTHVVPIYAGFSLPHGILRIDLAGRDLTNHLSKILSERGYSFTTSAEREIVRDIKERLCYVALDFEQEMQTSSQSSAIEKSYELPDGQVITIGNERFRAPEALFRPADLGLEAAGIDQTTFNSIMKCDMDVRKELYGNIVMSGGTTMFPGIAERMQKEITALAPSSMKVKIIAPPERKYSVWIGGSILASLSTFQQMWIS

SEQ ID NO: 28404 - protein, 159 aa, Streptococcus pyogenes MGAS315
MPNLYDFTVKAQDGSDISLVNYKEKVVLVVNTATKCGLTPQYQALQALYDTYHDKGFEVLDFPCNQFLNQTPGEAEEINRFCSLTYHTTFPRFAKIKVNGKDADPLFTWLKEEKSGPLGKRIEWNFTKFLIDQNGQVIKRYSSKTDPKLIEEDLKALLG

SEQ ID NO: 28405 - protein, 387 aa, Triticum aestivum
  misc_feature (340)..(340): Xaa can be any naturally occurring amino acid
TRPCGCGLSSVTLVEQVCTKKQAGTGPEFPGYRRPTRPVVRWEFSNPTPFIRSREFLWQEGHTVFATKEEADEEVLQILELYRRIYEEFLAVPVSKGRKSEMEKFAGGLYTTSVEAFIPNTGRGIQGATSHCLGQNFAKMFDITFENEKGERSMVWQNSWAYTTRSIGVMVMTHGDDKGLVLPPKVAPIQVIVIPVPFKDADTTAIKGACESAVYTLNQAGIRADLDARENYSPGWKYSQWEMKGVPLRIEIGPKDLANKQVRIVRRDNGTKVDIPSIDLVEQVRVLLDGIQANLLETAKAKRDACIVIISTWDEFIAALNDKKLILAPWCDEEEVERDXVKARTKGELGAAKTLCTPFDQPDLPSGTACFASGKPAQKWSFWGRSY

SEQ ID NO: 28406 - protein, 657 aa, Oryza sativa
  misc_feature (313)..(313): Xaa can be any naturally occurring amino acid
  misc_feature (566)..(566): Xaa can be any naturally occurring amino acid
MSSRQPSESREGRRASGAGGASSSRSSSRVASRSGSVHRSKEKKPVCIGQYIIQQTLGAGSFGKVKLATHALTGHRVAMKIINRRKISSLDMGGRVKREIQYLKLLRHPHIIKLYEVITTPNDIIMVIEYAGGELFQYIVDRGRMPEPEARRFFQQVICAMEYCHRHKIVHRDLKPENLLLDEYLNVKIGDFGLSNIMTDGDFLKTSCGSPNYAAPEVISGRLYAGPEIDIWSCGVILYVMLCGRLPFDDEYIPTLFKKINNGIYTLPSYLSQEARHLLSQMLIVDPVKRITIHEIRQHPWFNVDLPAYLRPXAAHTGGGEPRLQLWPYRPAVLDDLGPIDAEIVDELVGKMVGFNRDELLHHLADKSDNQVKVAYQLVRDHRRMLQIHHMEDAHGMENFLAQSPPAWNEGLEGFMGRSTSIKRKNRDKEVAGGAAVRSTTREPLTDAEDAAGERMERIAVLETSLPGYLRAREAERLATPSADKTAWPQCTPLSPTSGSGTPALPAAAAAAAASAAAQIHKKPRSRWHFGIRSRSPPMEIMLELYRTLQSLGMEWRQKPVARAAXRRRTRARARARAMQPTKTNTRRAKARRQQARAWSCFSSRRAGRWGMWWCAWICSCTTWMRSTTSSTFATSATRCSSPRWEQGQARRMRVRR

SEQ ID NO: 28407 - protein, 167 aa, Lotus japonicus
MAEQTSKSLYDFTVKDIRGNDVSLSQYSGKVLIIVNVASQCGLTQTNYKELNILYEKYKSKGLEILAFPCNQFAGQEPGTNDEIQDVVCTRFKSEFPVFDKVEVNGKNAEPLFKFLKDQKGGIFGDGIKWNFTKFLVNKEGKVVERYAPTTSPMKIEKDLEKLLQSS

SEQ ID NO: 28408 - protein, 932 aa, Streptococcus pyogenes MGAS315
MIEETSKEGDGHLPLKKLESSNNQTIIAEEVALLKEMLENITRRMIGDDAFTVIESIMVLSEKQDYIELEKVVANISNQEMEVISRYFSILPLLINISEDVDLAYEINHQNNTDTDYLGKLALTIKDLAGKDNGKDILEQVNVVPVLTAHPTQVQRKTILELTTHIHKLLRKYRDAKAGVINLEKWRQELYRYIEMIMQTDIIREKKLQVKNEIKNVMQYYDGSLIQAVTKLTTEYKNLAQKHGLELDNPKPITMGMWIGGDRDGNPFVTAETLCLSATVQSEVILNYYIDKLAALYRTFSLSSTLVQPNSEVERLASLSQDQSIYRGNEPYRRAFHYIQSRLKQTQIQLTNQPAARMSSSVGLNTSAWSSPASLENPILAYDSPVDFKADLKAIEQSLLDNGNSALIEGDLREVMQAVDIFGFFLASIDMRQDSSVQEACVAELLKGANIVDDYSSLSETEKCDVLLQQLMEEPRTLSSAAVAKSDLLEKELAIYTTARELKDKLGEEVIKQHIISHTESVSDMFELAIMLKEVGLVDQQRARVQIVPLFETIEDLDNARDIMAAYLSHDIVKSWIATNRNYQEIMLGYSDSNKDGGYLASGWTLYKAQNELTAIGEEHGVKITFFHGRGGTVGRGGGPSYDAITSQPFGSIKDRIRLTEQGEIIENKYGNKDVAYYHLEMLISASINRMVTQMITDPNEIDSFREIMDSIVADSNTIYRKLVFDNPHFYDYFFEASPIKEVSSLNIGSRPAARKTITEITGLRAIPWVFSWSQNRIMFPGWYGVGSAFKRYIDRAQGNLERLQHMYQTWPFFHSLLSNVDMVLSKSNMNIAFQYAQLAESQDVRDVFYEILDEWQLTKNVILAIQDHDDLLEDNPSLKHSLKSRLPYFNVLNYIQIELIKRWRNNQLDENDEKLIHTTINGIATGLRNSG

SEQ ID NO: 28409 - protein, 326 aa, Candida tropicalis
SIVGRPRHQGIMVGMGQKDSYVGDEAQSKRGILTLRYPIEHGIVSNWDDMEKIWHHTFYNELRVAPEEHPVLLTEAPMNPKSNREKMTQIMFETFNVPAFYVSIQAVLSLYSSGRTTGIVLDSGDGVTHVVPIYAGFSLPHGILRIDLAGRDLTDYLMKILSERGYTFSTTAEREIVRDIKERLCYVALDFEQEMQTSSQSSAIEKSYELPDGQVITIGNERFRAPEALFRPADLGLEAAGIDQTTFNSIMKCDLDVRKELYGNIVMSGGTTKFPGIAERMQKEITALAPSSMKVKIIAPPERKYSVWIGGSILASLSTFQQMWIS

SEQ ID NO: 28410 - protein, 368 aa, Brassica napus
MSRRQSLSLLKNIGRFTTGSQTQTRSVTYMPRPGDGKPRPVTLIPGDGVGPLVTNAVEQVMEAMHAPVYFEPFDVHGDMKSLPEGLLESIKKNKVCLKGGLKTPVGGGVSSLNVNLRKELDLFASLVNCFNLPGLGSRHENVDIVVIRENTEGEYAGLEHEVVPGVVESLKVITKFCSERIAKYAFEYAYLNNRKKVTAVHKANIMKLADGLFLESCQEVAKKYPSIAYNEIIVDNCCMQLVARPEQFDVMVTPNLYGNLVANTAAGIAGGTGVMPGGNVGAEYAVFEQGASAGNVGKDTTEEQKNANPVALLLSSAMMLRHLQFPSFADRLETAVKRVIAEGKCRTEDLGGKSTTQEVVDAVISNLD

SEQ ID NO: 28411 - protein, 136 aa, Zea mays
MPSFPLWLLCFCSLQYADLIQPIEKRMQNAMDYIKFIKPDLDVRVEPIVDPFGPSIVDQGLEAIIVSKETLPGGHAVNRKRAERGLTQLQIEVIELVPEESTGDKISSTAFRKMEAERALQQQNKQDDTAVGTPVG

SEQ ID NO: 28412 - protein, 624 aa, Oryza sativa
MASISGAAAPPSSSAACRLRLRRQLLLRPSHLRLRAPHSIADLSRSSSSSSEQQPSSTPAAPLASRPGQNGSTRGAVEKDPIKLWERYVEWLYQHKELGLFVDVSRMGFTEEFLRRMEPRMQRAFAAMRELEKGAIANPDEGRMVGHYWLRDPGLAPNSFLRTKIETTLDRILAFSQDVVSGKIKPPSSPAGRFTQILSIGIGGSALGPQFVSEALAPDNPPLKIRFIDNTDPAGIDHQIAQLGPELASTLVIVISKSGGTPETRNGLLEVQKAFRDAGLDFSKQGVAVTQENSLLDNTARIEGWLARFPMFDWVGGRTSEMSAVGLLPAALQGIDIKEMLVGAALMDEETRNTVVKENPAALLALCWYWASEGIGNKDMVVLPYKDSLLLLSRYLQQLVMESLGKEFDLDGNRVNQGLTVYGNKGSTDQHAYIQQLREGVHNFFVTFIEVLRDRPPGHEWELEPSVTCGDYLFGMLHGTRSALYANDRESITVTVQEVNPRAVGALVALYERAVGLYAYLININAYHQPGVEAGKKAAGEVLALQKRILLVLNEASCKDPAEPLTLDQIADRCHCPEEIEMIYKIIQHMAANDRALIAEGNCGSPRSIKVYLGECNVDDDMNS

SEQ ID NO: 28413 - protein, 326 aa, Candida maltosa
NIVGRPRHQGIMVGMGQKDSYVGDEAQSKRGILTLRYPIEHGIVSNWDDMEKIWHHTFYNELRVAPEEHPVLLTEAPMNPKSNREKMTQIMFETFNVPAFYVSIQAVLSLYSSGRTTGIVLDPGDGVTHVVPIYAGFSLPHGILRIDLAGRDLTDYLMKILSERGYTFSTTAEREVVRDIKERLCYVALDFEQEMQTSSQSSVIEKSYELPDGQVITIGNERFRAPEALFRPADLGLEAAGIDQTTFNSIMKCDLDVRKELYGNIVMSGGTTMFPGIAERMQKEITALAPSSMKVKIIAPPERKFSVWIGGSILASLSTFQQMWIS

SEQ ID NO: 28414 - protein, 386 aa, Exiguobacterium sibiricum 255-15
MLHFDEMMDQVAKIKVIGVGGGGSNAVNRMIEHGVQGVEFIAVNTDAQALNMSQADVKLQLGAKLTRGLGAGANPEIGKKAAEESREQLTEILSGADMVFVTAGMGGGTGTGAAPVIAEISKEIGALTVGVVTKPFMFEGRKRMQHAVSGVQNFKEKVDTLIVIPNDKLLEIVDRNTPMLEAFKEADNVLRQGVQGITDLIAVPGLINLDFADVKTIMTEKGSALMGVGVATGEHRATEAAKKAISSPLLETSIEGAKGVLMNITGSANLSLYEVTEAAQIVQSAADEEVNLIFGSVINDNLEDEIIVTVIATEFENEPLDFEIPSAQEMMKNLLKKKQASTPSPVAEEPKPQVEETPISSNQESAKGSDVEETMDIPSFLRRNNR

SEQ ID NO: 28415 - protein, 807 aa, Ralstonia eutropha JMP134
MNARTGAPNLPDPLGNDVVGERAVVPPIAQGKARMAASAMHDELTAVEEAPAALAADSLFIDAVLAQSYRHFFGPTSQPAVPPRQQVISITRLMEKLAYLKAPDQARVREAFQFSDEAHLGQYRQSGEPYITHPVAVAELCADWRLDVQSIMAALLHDVMEDQGITKSELAEKFGPKVAELVDGLTKLDKLEFQSREQAQAESFRKMLLAMARDVRVILVKLADRTHNMRTLDFVPPEKRRRIALETMEIYAPIAHRLGLNTIYRELQELSFKVGSPFRYATLEKAVKAARGNRREVVKRILEAAQKALADAGIVAELSGREKTLYSIYRKMHDKQLSFSQVLDVYGFRVVVETQMHCYMAMGALHSLYKPMPGKFKDYIAIPKINGYQSLHTTLVGPFGTPVEFQIRTREMHQIAEAGVAAHWMYKTQADHANDIQQQAHQWLQSLLDIQSQTGDSQEFLEHVKIDLFPDAVYVFTPKGHIRALPRGATALDFAYAVHSDLGNQCVAVKINNELLPLRTELKSGDIVEVVTAPYSKPNPSWLSFVRTGKARAAIRHYLKTTKLDEAIQLGERLLEQSARQLGIELKAVPQTVWDRMIQWTGNKHREDIFADLALGRRVPAVVAKRMEILLQELSGDVDSALLAAVQTFSGEEAPAVPITGDEGMSILFPACCRPIPGDPIVGYLGKGEGLQIHVQDCKVAKRLHSKDPEHWIDVMWAKKTARAFDVSIKVMVRNVKGIVARVAADLTSADANVAHVSMEQQDAGHQEATYMQFIIQVQNRLHLANVMRALRRNPDVIRIFRDRNDG

SEQ ID NO: 28416 - protein, 316 aa, Legionella pneumophila str. Lens
MSISNHHRLIILGSGPAGYTAAVYAARANLNPVLITGMQPGGQLTTTTDVDNWPGDIEGLQGPALMERMQKHAERFDTQVIFDHIVKADLAQAPFTLQGDSTTYTCDALIIATGASARYLGLPSETAYQGRGVSACATCDGFFYRNKSVCVIGGGNTAVEEALYLSNLASSVTLIHRRDSLRAEKILQDKLFEKAHSGNIKIIWNSTLDEVLGDEKKVTGAMIRNLKTGETDQLAIDGIFIAIGHTPNTAIFQDQLAMRDGYILIKSGLDGMATSTSVPGVFACGDVADHVYRQAITSAGFGCMAALDAEKYLDSI

SEQ ID NO: 28417 - protein, 326 aa, Candida viswanathii
SIVGRPRHQGIMVGMGQKDSYVGDEAQSKRGILTLRYPIEHGIVSNWDDMEKIWHHTFYNELRVAPEEHPVLLTEAPMNPKSNREKMTQIMFETFNVPAFYVSIQAVLSLYSSGRTTGIVLDSGDGVTHVVPIYAGFSLPHGILRIDLAGRDLTDYLMKILSERGYTFSTTAEREIVRDIKERLCYVALDFEQEMQTSSQSSAIEKSYELPDGQVITIGNERFRAPEALFRPADLGLEAAGIDQTTFNSIMKCDLDVRKELYGNIVMSGGTTMFPGIAERMQKEITALAPSSMKVKIIAPPERKYSVWIGGSILASLSTFQQMWIS

SEQ ID NO: 28418 - protein, 927 aa, Pseudoalteromonas tunicata D2
MQLNIFIRSPFFLKAILLGLLGGGINLVPLYFLSMTEFLFGQAFALYALIFYGRRYALLTSAIAASFLWIKWGHAWPSIAFLLEIFWLAHFCLQRKHPLLGWGIVYWCLIGLPILAVIGFFIMQLPQLALMTALVKYLLNALVCLAVVDIIGFYSKQYFSSGETQLPLIKLLRYSVSLLVGLASLIITLILINYNHQNVENYVHAQLNEKANDIAIAVDQYLNEHGKIIAAQADAVSVGLKLDSALNIISERYPAFITTLATDEKGNVVAATPTDLLDKLRDGHVSVADRDYFLQSKQNTETYISPTFEGRGFGNDPIVAVAHGIFKDTEFKGIIEGSLNLEAFSAFRPQLFDHNVELLILDGAQKVVFSSKNLTYQVLEKLTPQQITAFINTETTPAFIDKAQNSYFSGIKKSSHYQWHVVLLLDRSHIDVLAAKSWLKAMSILMLVTLLVFIFIARLSRWLVAPIELLTQKMQDFKPENNAKQSTLIERSWFEVDTLHQQFIELANSLNVNFQALAASNQKNEELNNKLSEFNHELAIEVERKTFELTQSVHIAEQANKAKSIFLANMSHEIRTPMNGMMGMLSIVLKQPSLNPDVVDKLQLIQSSAQTLMQILNDILDFSKIEAGQLTIEQAPVDLKAVFKESCDIFLMSSIKPNVEFRLEGIENLPDQLLCDALRLRQIIVNLLTNAGKFTPCGHIKVLVSYDEEYLRFSVADTGIGIAKEKQALLFNEFSQADVSTTRKYGGTGLGLAICSRLVTLLEGNIELQSEEGKGSCFTVSLPMKAPEELKEHDEPLNKSLDFTGHSILLVEDNPINQLVAQTMLRAFGFDVSVAENGQVALDMQVQHQFKIILMDCQMPIMDGYTATQTIRLEPDVYGKPIIIALTANAFMEDKAACYGAGMNDFISKPIDEQYLMKVLTKWSVQD

SEQ ID NO: 28419 - protein, 420 aa, Streptococcus thermophilus CNRZ1066
MSKESIIAFSQAKAEPLWLQDLRQAAFDKLDSLALPKIERVKFHRWNLGDGTIAENESSANVPDFTALGNNPKLVQVGTNTVLEQLPSDLINQGLVFTDLATALEEIPEVVESFFGKAVAYDEDKLAAYNYAYFNSAAVLYVPDNVEIDLPVESYFYQDGDSSVPFNKHVLIVAGKNSKLTYLERFETLGESTEKASANISVEVIAQDGAQVKFAAIDRLGENVTTYISRRGRIGRDASIDWALGIMNEGNVIADFDSDLIGNGSHANLKVIGLSSGRQVQGIDTRVTNYGNNSVGHILQHGVILERGTLTFNGIGHIVKGAKGADAQQESRVLMLSDKARSDANPILLIDENEVTAGHAASIGQVDPEDMYYLMSRGLDQETAERLVIRGFLGAVITEIPVKEVRDEMISVTDTKLNKR

SEQ ID NO: 28420 - protein, 116 aa, Hevea brasiliensis
MAALKMVSFLVLCMLVAAPMTAQAITCGQVQSALVPCLSYLKTTGPTPPATCCNGVRTINNAAKTTADRRTACQCLKSAAGSVKGLNPTTVAGLPGKCGVNIPYKISLSTNCATVK

SEQ ID NO: 28421 - protein, 274 aa, Ralstonia eutropha JMP134
MPPMPAPTGQPVSMDSGPVLLAWQGNVAVITLNRPDKLNSFTREMHGALQQALDHVEAGGARALLLTGAGRGFCAGQDLADLDFTPGKMTDLGDLIDSYFNPLVRRLQALPMPVVAAVNGTAAGAGANLALACDMVLAARSASFIQAFVKIGLVPDSGGTWLLPKRIGMSRAMGLAMTGEKLTAEKAEKWGLVWEIMDDPLLHEQALALATQLAAQPTRALAAIKRAMYASATATLDAQLDLERDLQRELGQSADYAEGVNAFLEKRAPKFTGR

SEQ ID NO: 28422 - protein, 138 aa, Shorea leprosula
EKNIPVLLGLLSIWNVSFLGYPARGILPYSQALEKFAPHIQQLSMESNGKGVSIDGVPLPYEAGEIDFGEPGTNGQHSFYQLIHQGRVIPCDFIGSAKSQQPIHLKGEVVSNHDELMSNFFAQPDALAFGKTPEELHK

SEQ ID NO: 28423 - protein, 247 aa, Methanococcus maripaludis S2
MTTDSKNARNSEVKIQGDEKISNVEKAIDALKSGKMVLLYDSDDREGETDMVVASEFITPEYIREMRKNAGGLICTCLHSDFCDKLGIPFMVDILDVASEKYPVLKELYPNDIPYDEKSTFALYANHRTTFTGITDNDRALTVKKITELCSEERFKDFGKEFRCPGHVAFLRATEGLVKNRQGHTEMTVALAEMAGLTPITTICEMMGDNGKAMSKDLVKKYAEENGLVTINGQELIEYYLKEFSKE

SEQ ID NO: 28424 - protein, 481 aa, Prosthecochloris aestuarii DSM 271
MAEKITLRETDYSQWYIDLVRSAKLADYSDVRGCMIIRPNGYAIWEKMQAALDAMFKATGHVNAYFPLFIPESFIKKEAEHIEGFAPECAVVTHGGGEQLAENLYVRPTSETIIWSSYKKWIQSYRDLPILINQWANVVRWEMRTRLFLRTTEFLWQEGHTAHATSTEAQEEVMRMINVYKTFAEEYMALPVIMGRKTESEKFAGAVETWCIEAMMQDKKALQAGTSHNLGQNFAKAFDCRFQSKEGALEYVWATSWGVSTRLIGALIMAHSDDRGLVLPPKLATRQVVIIPILKGDISAVIEKARSIAAELNQKGIAAFVDDSDQNSPGWKFAEYELQGIPVRLELGPRDIQSSTCIAARRDTGEKSKLQLDSSLADQINSLLESIQTNLFNRALSFREKHTLEVSSYSEFKANIDNGFLVAHWDGTDETEAKIKEETKATIRVMPADPEMVLRYGMDQPGTCIYSGKPSTRKVIFAKAY

SEQ ID NO: 28425 - protein, 507 aa, Candida albicans SC5314
MLASKKKRTRRIKRQPICEQIPTSNTAFFFTLDIPIMPVNFLTSVVFDGPEVIPYWDQIKEYGPTVLPILLTLAGAKYYFHGATNTWERDMHGKVFMITGGTSGIGAQIAYELGQRGAQLILLTRRTNDQWVAEYIEDLRDKTNNGLIYAEECDLSSLYSIRKFATRWLDNQPPRRLDGVICCAAECIPRGKSRQITMDGVERQIGINYLAHFHLLTLLGPSLRVQPPDRNVRVLIATCSSQNLGDVDLNDLLWSNKRYPATQPWKVYGTSKLLLGLFAKEYQRQLMGYERKDKAPCNVRINLINPGIVRTPSTRRFLSLGTVWGLIIYLILFPIWWLFFKSAEQGAQSFYFALFAPIFMKIEGGNVVQECKIMTKVRKEYTDDDLQQKVFHNTEELIKQIETKSAIERKKHENAKKTPEQKAKERQEELNRKRDLHIKPETPEELESKLNSLRNQIGMGTGISSNEMPLFPDDETLKKVISSKKNASSNNSGGSKSNKSQKKSKKV

SEQ ID NO: 28426 - protein, 138 aa, Shorea ovata
EKNIPVLLGLLSIWNVSFLGYPARAILPYSQALEKFAPHIQQVSMESNGKGVSIDGVHLPYEAGEIDFGEPGTNGQHSFYQLIHQGRVIPCDFIGSAKSQQPIHLKGEVVSNHDELMSNFFAQPDALAFGKTPEELHK

SEQ ID NO: 28427 - protein, 402 aa, Oryza sativa
MPEPEVGVLGGRGLHRDGLKGWPDLRSLSGKKMTTPPPPPVEKQQQQARPAAVAPPDQTLEFSDGLLLRVLACLPEPHLTGAASLVCRRWMRLAGRLRRRLVVRDWAFVTHRLHHRFPELADLDLFPASIVAPAVPSPTSPLLTCAEVSLTLDTGADPPLVACRFLADDVLDRGLVAVAASFPNLRRLSATAASESGGLMDIAGGCATLQELELHRCTDLALRPVSAFAHLQILRLVAASSALYGTSEDGGVTDIGLTILAHGCKRLVKLELVGCEGSYDGIAAVGRCCAMLEELTIANHKMDNGWLAALAFCGNLKTLRLQGCCRIDDDPGPAEHLGACLTLESLQLQQCQLRDRRALHALLLVCEGARELLVQNCWGLEDDMFAMAGLCRYSNHQSHFSI

SEQ ID NO: 28428 - protein, 330 aa, Phytophthora sojae
MKYRYPLKLLYLFVCIMRGSTVLAPQKSQPKATINCWSRMVMEVRVRGLEGPKEDEPQELPDESQIVVVTPGQVISTDTGAFLRGHGTYLSGRNELVASVAGVVEKVNQLITVRPLVSRYIGEVGDIVVGRVTDVANKRWKVDVNGQQDASLMLSSVTLPGGAQRRRTYADQLQMRAFFVENDLISTEIQEVRYDGSLSLHTRSLRYGKLENGQFVAVAAPLVKRMKQHMVTLPGLGIDVILGTNGYIWVSRSMAALGGDDAEDTSSSMETRVEVLTAKRQLHASTPMSVEDRRKIARVSQALLKLNEQFRLITPESIMATYELLESQGR

SEQ ID NO: 28429 - protein, 309 aa, Pasteurella multocida
MMTRKSLRIATRQSPLALWQANYVKACLEKIHAGLVVELVPMVTKGDVILDTPLAKIGGKGLFVKELEQALLKGEADIAVHSMKDVPMQFPAGLMLSTICQREDPRDAFVSNSYRTLMELPAGAVVGTSSLRRQCQLKQLRPDLHIHSLRGNVGTRLAKLDNGDYDAIILAAAGLIRLGQQQRITSLIDVTQCLPAVGQGAVGIECRQEAEIELLLAPLADPETTACVLAERAMNRHLQGGCQVPIAGYAIIEEGQLFLRALVGEVDGSSILRAEGRSAVADAETLGIQVAEKLLQQGADKILQTLYSN

SEQ ID NO: 28430 - protein, 217 aa, Shewanella sp. MR-7
MNQSLLAPFGTAIERVEAGLEALRQGQGVLVVDDEDRENEGDLIFAAESLTNAQMAMLIRECSGIVCLCLPDEKVKALELPPMVENNSSQYGTAFTVSIEAKVGVTTGVSAADRVTTIKAAIADNAKPSDLARPGHVYPLRAQPGGVLTRRGHTEGTIDLMQLAGLKPAGVLCEVTNPDGTMARLPEIIAFGAAHNMPVLTIEDIVVYRKSLLANVG

SEQ ID NO: 28431 - protein, 112 aa, Blastopirellula marina DSM 3645
MKKIEAIVRHHKLDEIKDALVSKGFGGMTAIEVQGFGRQKGQTETYRGAEYSIDFVPKIKIEIVATDEQFQEIVDTIIEKAQSGQIGDGKIFVSELTDVIRIRTAESGSAAI

SEQ ID NO: 28432 - protein, 565 aa, Oryza sativa (japonica cultivar-group); identical to SEQ ID NO: 411

SEQ ID NO: 28433 - protein, 653 aa, Caulobacter crescentus CB15
MNAATLVDTHAVDTALQEAFEAAPEGFALFDAEDRCVIWNARYGELWSKWGVTLAVGATFESLLLAGLAAGRFPEANGDRAAWLAHQLGRRKLDRIEEIREEFGEYLRFESRRTPAGGLITTCANLTNLRRREAQALAARSFLDTIVENTPAMLFVKDGDTGAFLLVNRAAENQLGVPRAELLGKSDYDFFPKEQADAFAADDRRVIASGKLVTIDEEPLDTPHNGRRWLQTRKIAIPGEDGRRHLLVICEDITERKAGAAALAEALQKAEAGSVAKSEFLANMSHEIRTPLNGVIGMAEVLSRTALDDAQREMMEVILNSGRALNLLLSDILDLSKIEAGGLELSRDPLDLREAITAAVAVFKAVAESKGLVFRLTFADDFHDHVLGDALRVRQIVANLTSNAVKFTTAGSVIIEARTLVAEDGRIDLTVSVQDTGEGFDEDSADRLFERFQQADGSVTRKVGGTGLGLPIARRLARLMDGEISCVAHPGEGATFVFEALFLADGQRTPAASADPAGELALDRRLRVLLAEDHPTNQKVIGLMLADAADVTVAEDGQAAVEAFEKHAYDVVLMDTQMPVMDGLAAIAEIRRREREAQARRTPIISLTANAMPHQVRACLEAGADLHLAKPVSIQGLFATLGAALETRPGGEG

SEQ ID NO: 28434 - protein, 326 aa, Candida parapsilosis
SIVGRPRHQGIMVGMGQKDSYVGDEAQSKRGILTLRYPIEHGIVSNWDDMEKIWHHTFYNELRVAPEEHPVLLTEAPMNPKSNREKMTQIMFETFNVPAFYVSIQAVLSLYSSGRTTGIVLDSGDGVTHVVPIYAGFSLPHGILRIDLAGRDLTDYLMKILSERGYGFSTTAEREIVRDIKEKLCYVALDFEQEMQTSSQSSAIEKSYELPDGQVITIGNERFRAPEALFRPADLGLEAAGIDQTTFNSIMKCDLDVRKELYGNIVMSGGTTMFPGIAERMQKEITALAPSSMKVKIIAPPERKYSVWIGGSILASLSTFQQMWIS

SEQ ID NO: 28435 - protein, 259 aa, Oceanospirillum sp. MED92
MSTPTNLKVSEPTKGVLTITLHRPEALNALNTKLLEELADLLDEIQSNPEVGAVVITGSSKAFAAGADVREMATLDAVGVLRDPRVDHWKRITAFKKPLIAAVNGFCLGGGCELAMHADIIIAGEEAKFGQPEIKLGIMPGAGGTQRLLRAVGKSMAMQMVLTGEPISAQQAMGFGLISEITIPETTVERAQKVAQQIARHAPIAVEMAKDSVLKAFDTDLASGLLYERKAFTLLAATEDRNEGINAFIEKRKPAFKGC

SEQ ID NO: 28436 - protein, 311 aa, Zea mays
MEIFVPLANRLGVASWKDQLENLCFKYLNPEEHEELSSKLRESFDEELITSAVDKLDKGLRDAGVSYHSLSGRHKSLYSIHCKMLKYRSLHTVVMSEGVHPFEVQIRTREMHLQAEYGFAAHWRYKEGTCRHSFVLRMVEWARWVLTWQCEAMDRERTASLGSDDGTVSVRPPPACPFPQHAEDCPYSYTRQCNHDGPLFVILLEHGKMSVQEFPANLTVMDLMDRVGANSSRWSPYSIPMKEDLRPRVNGEPICDPDRRLNMGDVVELTPALPRKSLSGYREEIQRMYDRGGFALSARGGGGGGGGARRC

SEQ ID NO: 28437 - protein, 263 aa, Oceanospirillum sp. MED92
MNFETVSLSIEDGVALLALNRPDRLNSFNADMHEEMRQAIKAIKKDESVRCLVLTGNGRGFCAGQDLSDRNVAADAEMPDLGLSVEKNYNPLVRTLRDLPMPVICAVNGVAAGAGANLALVCDIVVAGRSASFIQGFSKIGLVPDSGGTWTLPRLVGTARAKALMLLSDKVSAEQAEEWGMIWKCVDDEALMDEVMGMAKKLAKQPTKGFDLTLRAVNAANTNTLDEQLDLERDLQRLAGRTDDYREGVAAFMEKRAPEFKGK

SEQ ID NO: 28438 - protein, 549 aa, Bradyrhizobium sp. BTAi1
MTQPQRMTAPTLPTYSPRGLALLRDPLLNKGTGFTEQERDALGLRGFLPAGVLSMQAQAERILVNLRSLPSDLEKYVALNALHDRNEALFFRVVCDNIDEIQPLIYTPTVGLACQKYGLIFQRPRGLFISANDRGRIAEILANWPYRAKLIVVTDGERILGLGDLGANGMGIPVGKLSLYSACAGIHPEECLPVMLDVGTNNEEFLKDPYYIGLRQKRITGAAYDEFVDEFMTAARAAFPGVLIQFEDFANHAAFKLLHKYRDDACVFNDDIQGTAAVALAGLFSALRITGGRLRDQRVLFLGAGEAATGIADLVVSAMMAEGLSEAEALQRNWLTDSRGLVVKGRENLHGHKLRYAHEQAPIGDFLTSIRTLKPTAIIGVAAVGGAFTPEVLQAMAELNERPIIFALSNPTSKAECSAEAAYRYTQGRALFACGSPYDPVKLDGKTFVPRQGNNSYIFPGVGLGAIASGARLVTDEMFMAAAHTLANCVTGADLEQGSLYPALPRIREVSALIGAAVAGVAYQNGLASGPAPNDLLGFVEQKMYDPRY

SEQ ID NO: 28439 - protein, 299 aa, Zea mays
EPAVRRAGRETVLSPPIRHQPGPGTLSPNPHVMAAALFSTSLSPRFLALSSPKPAAPAASAFLPFTLPLRSVSAPAPARRVFEPVAVAVSSEYGTEGAEQQDGEFSEDLKLFVGNLPFSVDSAQLAGLFEQAGSVEMVEVVYDRMTGRSRGFGFVTMSSAEEAGAAVEQFNGYTFQGRPLRVNCGPPPPRDGSAPRAPRGGGGGGGGSSFVDSGNKVYVGNLAWGVDNSTLENLFSEQGQVLDAKVIYDRDSGRSRGFGFVTYGSAEEVNNAISNLDGIDLDGRQIRVTVAESKPRREF

SEQ ID NO: 28440 - protein, 472 aa, Streptococcus thermophilus CNRZ1066
MTETNEKVEPKPIDLGEYKYGFRDDVTPVFSTGKGISEDVVRAMSAEKEEPEWMLEFRLKSLETFNKMAMQEWGPDLSGINFDDLTYFQKASDKPARDWEDVPEKIKETFERIGIPEAERAYLAGASAQYESEVVYHNMKEEYDKLGIIFTDTDSALKEHPELFKKYFSKLVPPTDNKFAALNSAFWSGGTFIYVPKGVKVDIPLQTYFRINNEATAQFERTLIIVDEGASVHYVEGCTAPTYTTASLHAAIVEIFALDGAYMRYSTIQNWSDNVYNLVTKRATAKKNATVEWIDGNLGAEVTMKYPSVYLDGEGARGTMLSIAFANAGQHQDTGAKMIHNAPHTSSSIVSKSIARNGGKVDYRGQVTFNKDSKKSVSHIECDTILMDDLSKSDTIPFNEIHNSQVALEHEAKVSKISEEQLYYLMSRGLSEQEATEMIVMGFVEPFTKELPMEYAVELNRLISYEMEGSVG

SEQ ID NO: 28441 - protein, 326 aa, Clavispora opuntiae
SIVGRPRHQGIMVGMGQKDSYVGDEAQSKRGILTLRYPIEHGIVTNWDDMEKIWHHTFYNELRVAPEEHPVLLTEAPMNPKSNREKMTQIMFETFNVPAFYVNIQAVLSLYSSGRTTGIVLDSGDGVTHVVPIYAGFSLPHGILRLDLAGRDLTDYLMKILSERGYTFTTTAEREIVRDIKEKLCYVALDFEQEMQTSSQSSAIEKSYELPDGQVITIGNERFRAAEALFRPSDLGLEAAGIDQTTYNSIIKCDVDVRKDLYGNIVMSGGTTLFPGIAERMQKEITALAPSSMKVKIIAPPERKYSVWIGGSILASLSTFQQMWIS

SEQ ID NO: 28442 - protein, 311 aa, Citrus unshiu
MAVGLLAAIVPKPFCLLTTKLQPSSLLTTKPAPLFAPLGTRHGFFNGKNRRKINSFTVCFVLEEKKQSTQIETFTEEEEEESGTQISTAARVAEKLARKRSERFTYLVAAVMSSFGITSMAVMAVYYRFWWQMEGGEVPLAEMFGTFALSVGAAVGMEFWARWAHKALWHASLWHMHESHHRPREGPFELNDVFAIINAVPAIALLSFGFFHKGLVPGLCFGAGLGITVFGMAYMFVHDGLVHKRFPVGPIADVPYFRRVAAAHQLHHSDKFHGVPYGLFLGPKELEEVGGLEELEKEISKRIKSYNRVPK

SEQ ID NO: 28443 - protein, 360 aa, Neisseria meningitidis MC58
MPSEAASDGILPLYPTRTIFQKPIMLPFFPEPSLSYTQQNRTAVLLLNLGTPDAPTAQAVRPYLKSFLTDRRVVELPKWLWYPILHGLVLTLRPKKSAHAYEKIWFKEGSPLEVYTARQAAALAKRMPDLIVRHAMTYGNPSVADVLSELKAQGAGRLLVIPMYPQYAASSSGAAVDKVCEQLLLQRNQMSVRTVSRFYDDTGYIDAMKNHILRYWAEHGRGKKLMLSFHGVPQKHHDLGDPYPDECRHTAKLLAEALELTEDQYVVSFQSQFGRAKWVTPSTQDLFGKLPKQGVTELDVFCPGFLADCLETMEEIALMGREQFYEAGGKSYRYIPCLNDNPDWIDALVALAEENLGSWR

SEQ ID NO: 28444 - protein, 499 aa, Silicibacter pomeroyi DSS-3
MQELTHYINGEHVKGTSGRFADVFNPATGDVQAKCPLASTEEMARAVEIAAAAQPAWAAVNPQRRARVMMKFVDLLNRDMDKLAEALSREHGKTLPDAAGDVQRGLEVVEYCIGAPHLLKGEFTDSAGPGIDMYSMRQPLGVTAGITPFNFPAMIPMWMFAPAIACGNAFILKPSERDPSVPLMLAELMEEAGLPKGILQVVNGDKEAVDAILYNPVIQSVGFVGSTPIAEYIYGTGCAQGKRVQCFGGAKNHMIIMPDADMDQAADALVGAGYGAAGERCMAISVAVPVGDDTADRLIEKLVPRIEKLKVGPYTAGKDVDYGPVVTAAAKENILRLVNSGVEQGAKLVVDGRDFSLQGYEDGFFVGPHLFDHVTPDMDIYKKEIFGPVLSTVRAKTYEEALGLAMDHEYGNGTAIFTRDGDAARDFANRINIGMVGVNVPIPVPLAYHTFGGWKKSAFGDLNQHGPDAFKFYTRTKTVTARWPSGIKEGGEFSIPVME

SEQ ID NO: 28445 - protein, 411 aa, Clostridium acetobutylicum ATCC 824
MNRRVVITGIGAVTPVGNNADSFWCSIKEGKCGIDKIKAFDATDFKVKLAAEVKDFTPEDFIDKREANRMDRFSQFAIVAADEAIKDSKLDLESIDKNRFGVIVGSGIGGIGTIEKQDEKLITKGPGRVSPMTIPMIIANMASGNLAIRYGAKGICTTIVTACASANNSIGESFRNIKFGYSDVMISGGSEAGITPLSLAGFASMKAVTKSEDPKRASIPFDKDRSGFVMGEGSGIVILEELEHALKRGAKIYAEIVGYGATCDAYHITSPAPNGEGGARAMKLAMEEDNVRPEDISYINAHGTSTAYNDSFETQAIKTVLGEYAYKVPVSSTKSMTGHLLGAGGAVEAIICAKAIEEGFIPPTIGYKEADPECDLDYVPNEGRNAEVNYVLSNSLGFGGHNATLLFKKYK

SEQ ID NO: 28446 - protein, 326 aa, Kineococcus radiotolerans SRS30216
MPRTRPDINVPALVGRHAVVTGASDGVGLALATRLAAAGADLTLPVRNQVKGRAALAAIRRAVPGARVVMADLDLSSLASVAAFGARMQEEGKAIHLLVNNAGVMTPPQRQSTVDGFELQFGTNHLGHVALVAHLLPLLRAGRARVTSQVSVAARSGRVNFEDPNWRDAYHGMKAYSSSMIAFGLFGLELERRSRAQGWGITSNLSHPGIAPTSLLAARPEVGRSADTTQVRRIRTLSRWGLVGTVETALLPALMAATSQESEGGKLYGPRGPGHLSGGPSEQKLYRPLRSTADAAHVWEISEALTGVSFPRSAADVLLAGQEKAS

SEQ ID NO: 28447 - protein, 466 aa, Ricinus communis
MPPQAGSKWYDDDGKLKRTGTVWTASAHIITAVIGSGVLSLAWAVAQLGWVAGPAVMFLFSLVTYYTSTLLSACYRTGDPVNGKRNYTYMDAVRSNLGGAKFKICGYVQYVNLIGVAIGYTIASSISMMAVKRSNCFHKSEAKNPCHMKCQSLHDCILEVVESSSSQIPDFDQTMGGLSIVAAIMSFTYSTIGLGLGIAEVTKNGKAMGSMTGISIGTVTETQKIWRSFQALGDIAFAYSYSLILIEIQDTIRSPPAESKTMRKATLISVSVTTLFYMLCGCFGYAAFGDMSPGNLLTGFGFYNPYWLLDIANVAIVVHLVGAYQVYCQPLFAFVEKAAVQRFPDSEFILKDIKIPIPGCKPYNLNLFRMVWRTVFVIFTTVISMLLPFFNDIVGLLGALGFWPLTVYFPVEMYIAQKKIPKWSTRWLCLQILSAACLIITIAAAAGSIAGVIVDLKTVKPFQTTY

SEQ ID NO: 28448 - protein, 326 aa, Debaryomyces etchellsii
SIVGRPRHQGIMVGMGQKDSYVGDEAQSKRGILTLRYPIEHGIVTNWDDMEKIWHHTFYNELRVAPEEHPVLLTEAPMNPKSNREKMTQIMFETFNVPAFYVNIQAVWSLYSSGRTTGIVLDSGDGVTHVVPIYAGYSLPHGIMRIDLAGRDLTDYLMKILSERGYTFSTTAEREIVRDIKEKLCYVALDFEQEMQTSSQSSAIEKSYELPDGQVITIGNERFRAAEALFRPSDLGLEAAGIDQTTYNSIMKCDVDVRKELYGNIVMSGGTTMFPGIAERMQKEITALAPSSMKVKIIAPPERKYSVWIGGSILASLSTFQQMWIS

SEQ ID NO: 28449 - protein, 504 aa, Solibacter usitatus Ellin6076
MAVQSEVALKTVDHWIGGARITSKSGRSGTVWNPATGRAQALVAFASIEEVDHAVAAAKAAFPAWRATPLSRRAETMFKLRDLIDANRRRIAEALTLEHGKTTADAMGEIARGLENVEFACGIPQMLKGGYSEQASRGVDVYQIRQPLGVVAGITPFNFPAMVPMWMFANAIACGNTFILKPSEKDPSVSLLLAELIHEAGVPAGVFNVVQGDKVAVDRLLEHPDVKAISFVGSTPVAKAIYETGTRNGKRVQALGGAKNHMLVLPDADIGMAADAAVSAAYGSAGERCMAISVVVAVGGVADPLIAAIQERMLKIKVGPGMDEGNEMGPLITREHRDSVAAHLDAATAEGATLTVDGRQNPVTGRDGFFLGTSLIDNVKPGMSCYDDEIFGPVLGIVRVKTYAEALKMINDNPFGNGTAIFTRDGGAARQFQFDVDAGMVGINVPIPVPVAYYSFGGWKASLFGDVHMYGPEGIQFYTRAKVVTSRWPDPETSKVDLGFPQVR

SEQ ID NO: 28450 - protein, 394 aa, Azotobacter vinelandii
MFELVDNVPQSAVIKVIGVGGGGGNAVNHMAATSIEGIEFICANTDAQALKNITARTVLQLGSGVTKGLGAGANPEVGREAAMEDRERIAEVLQGTDMVFITTGMGGGTGTGAAPVIAEVAKGLGILTVAVVTRPFPFEGRKRMQVAEEGIRLLAEHVDSLITIPNEKLLTILGKDASLLSAFAKADDVLAGAVRGISDIIKLSGMINVDFADVKTVMSEMGMAMMGTGFASGPNRAREATEAAIRNPLLEDVHLQGARGILVNITAGPDLSLGEYSDVGNIIEQFASDQAMVKVGTVIDPDMRDELHVTVVATGLGTRADKPMKVVDNTLQPAGAAAAAPAVPRGDQTVNYKDYERPTVQRQSHAASATAAKINPQDDLDYLDIPAFLRRQAD

SEQ ID NO: 28451 - protein, 242 aa, Zea mays
  misc_feature (31)..(31): Xaa can be any naturally occurring amino acid
  misc_feature (52)..(52): Xaa can be any naturally occurring amino acid
AVPKKFQTIRTVQQALPSSTWVQDIKGNLSXGLEEFLQLWDLLEDFKLHDRXDRHVWRFSNSGMFSSKSAYRVFFTGVVSFEPWKGIWRSWAAPKCKTFIWLAINNKCWTADRLKKRGLVFPVSCVLCDQDDETVQHILSNCVFARQFWHSTISLIGLAAVVPKYSDVCFDDWWREASSKIVKGKSKGFNSLVILGAWSLWKHRIRCVFDGARPSMNTLVDGFKEELHLGRCKKYATLFDPG

SEQ ID NO: 28452 - protein, 125 aa, Glycine max
  misc_feature (45)..(45): Xaa can be any naturally occurring amino acid
  misc_feature (52)..(52): Xaa can be any naturally occurring amino acid
  misc_feature (82)..(82): Xaa can be any naturally occurring amino acid
RWLDLKVACVVAVMCLAEVAINATPMAHAAITCGQVARRHVLLSXSVFLRSXRKPSQACCNGVNSLSSAAKTTDDRQRAYSXLKNLAYNIGQSLNADNAYSLPGKCDVYIPYKIRNFTNCTTINF

SEQ ID NO: 28453 - protein, 138 aa, Oryza sativa (japonica cultivar-group)
MVPAARSGWPAAAAVLVVVLVLSSPPGTSTVVVARAALSCSTVYNTLLPCLPYVQSGGAVPAACCGGIRSVVAAARTTADRRAACTCLKNVAAGAAGGPYISRAAGLPGRCGVSVPFKISPNVNCNAYVKTKNQINLY

SEQ ID NO: 28454 - protein, 327 aa, Shewanella oneidensis MR-1
MGHAARGKVGVLLLNLGTPDAPTASAVRRYLAEFLSDPRVVEIPKLLWMLILYGIVLRVRPAKSAALYQKVWTEAGSPLMDISLRQTAKLSDKLTADGHQVSVHLAMRYGNPSVASTLREMHKQGIDKLVVLPLYPQYAAPTTGSAFDAIAKELSQWRYLPSLHFINTYHDNPDFIAALVNSIRDDFDKHGKPQKLVLSYHGMPERNLHLGDPYYCFCMKTTRLVAEQLGLSKDEFAITFQSRFGKAKWLQPYTDATMAALPSQGVRDVAIVCPAFSADCLETLEEIVGENGHIFTHAGGEKFRYIPALNDNDDHIAMMANLVKPYL

SEQ ID NO: 28455 - protein, 588 aa, Bordetella bronchiseptica RB50
METVSDFVLERLAQWGIRRIFGYPGDGINGLMGAFGRTRQPLEFVQARHEEMAAFMACAHAKFTGQVGVCMATSGPGAIHLLNGLYDAKLDHQPVLALVGQQARRALGGDFQQEVDLVSLFKDVAHDFVQQAASAEQARHLIDRALRIALERRCVTCVILPNDVQDLPAVRELPREHGSVPTGIGVTSHAGVPPDTALRNAADILNRGERVAILAGAGALEAAEPLRAVAERLGAGVAKALLGKAALPDALPYVTGAIGLLGTQPSWEMMNECDTLLMVGTAFPYSEFLPREGQARAVQIDRDGRNLNLRYPVEVGLAGDSRQTLQALLPLLENKPRARWRERIEASVARWWRTVEARAMVDASPVNPQRVFWELSQRLPDRSIVTADSGSAANWYARDVKLREGMMASLSGGLATMGCAVPYALAAKLAYPERPVVALAGDGAMQMNGINELITIADRWRAWADPTLVVLVLNNGDLNLVTWEQRVMGGDPRFEDSQRLPPFAYADYARMLGLHGLRVERAQDLGAAWGEALTAGRPAVLEVMTDPEMPPLPPHIPARQVRAYVQALRADPAGGAALRATLKQWWAG

SEQ ID NO: 28456 - protein, 102 aa, Acinetobacter genomosp. 13TU
RGATGEVIQDVVNIGVGGSDLGPQMVTHALCDFKVKTAKPLNVHFVSTMDGSQLSDLLHQLRPETTLFIISSKSFGTIDTLSNAQTVRQWLEKALGKHERVV

SEQ ID NO: 28457 - protein, 177 aa, Ceratodon purpureus
MAPPTVGTQAQAAPAMVPARVYSKDDEVLVKKSWDILKKDAQRNGINFFRKVFEIAPGAKSMYSFLRDSTIPFEENPKVKNHARYVFMMTGDAAVQLGEKGAYQVLDSKLQKLAATHINAGVTDDQFEIVKEAILYAIEMGVPELWSPELKSAWGDAYDMLAAAVKAEMHAQRAAAQ

SEQ ID NO: 28458 - protein, 775 aa, Bradyrhizobium japonicum USDA 110
MGWRVETSQQAEPRDGLVGAFLYWLGGFEIEDGLTADLSERELGRIRAKQIDAVTRLIPVTMAVTMLNVAIVLILFWGRGWNDFLAIWGLTLAATASLAVRSWRRSYRNPPQEASPRAARHMLRQAFFLAAIWGTLPLALFSHIEPTSQLILACLMVGMMSGGAFTLSTFPRAGLVYLATMTVGCAGALLLCGAGPYLVTAGFLLLFAFFMARNIVSQGNLFLGNLKAQLELERQTEIISLLLKDFQENASDWLWQTDAEGHLVDVPERFADVAQLPLPLLKGSHFADVLDMLCPEDKSAAYNIVGLMEHAEPLHEMNLKVVAGGEARLWSFTAKPAYDRDGQFLGYRGFGRDVTERWRAEKAEAESRAKSDFLAVMSHEIRTPMNGVLGLASMLLETRLDPEQREAVATIRESGDNLQRILNDILDLSKLEAGRFAFEAIDFAPHALVETVATVVRASAKSKGLTVKVELDPNLPPTLRGDVARIRQVLLNLASNAVKFTDEGEVTISATCQTRRDLLATVEWTVKDSGIGIAPEKLGLLFSDFAQADASISRRFGGTGLGLAISRRIIEQMGGTIGVTSTPGEGSTFRFTLVLPWSQAPASDQAAGRDEADELKAHIAELDRPLKVLVAEDDAVNRLVVSKMLGAFDVELRVVTDGVEAVAAASEGDYDVVLMDVRMPDMDGLAATRAIRAQGGRFEALPIIALTANAFPEDVKICREAGMSDFLAKPLRKPALVAALLRALNHVASDDAPLQPELMPVEVEWTEEERQITGA

SEQ ID NO: 28459 - protein, 258 aa, Magnetospirillum magnetotacticum MS-1
MAFENITVETRGNVGLIALNRPKAMNALCAALITELGQALDAFEADDAIGAVVLTGSEKAFAAGADIKEMADKGYMDNYLSNFITDGWERVTKCRKPVVAAVAGFALGGGCEMAMMCDFIIAGDNAKFGQPEITIGTIPGAGGTQRLTRAVGKAKAMEMCLTGRMMDAAEAERSGLVSRVVPVAELVDEAVKAATKIAALSRPIVMLCKESVNAAFETTLAQGVTFERRLFHSTFATLDQKEGMAAFVEKRAPAFKNR

SEQ ID NO: 28460 - protein, 102 aa, Acinetobacter baumannii
RGATGEVIQDVVNIGVGGSDLGPHMVTHALADFKVKTAKPLNVHFVSTMDGSQLSDLLHQLRPETTLFIISSKSFGTIDTLSNAQTVRQWLEKALGKHDRVV

SEQ ID NO: 28461 - protein, 161 aa, Pseudomonas syringae pv. syringae B728a
MSENLLSIPVTTIKGEQKTLADFSGKALLVVNTASQCGFTPQYKGLEKLWQDYRDQGLVVLGFPCNQFGKQEPGDEGAISGFCELNYGVSFPLFKKIDVNGEQAHPLFVQLKQQAPGLLGTERIKWNFTKFLIGQDGRLVKRFAPLTKPEELTGEIEALLR

SEQ ID NO: 28462 - protein, 312 aa, Prosthecochloris aestuarii DSM 271
MKQQLIIGTRSSPLALWQAEFTKAELSKNFPELDIQLKLIKTTGDVLLDSPLSKIGDMGLFTKDIEKHLLAKEIDLAVHSLKDVPTETPEGLILSAFTEREDTRDVIISKNGDNLKQLKPNAKIATSSLRRTSQLLGIRPDFEMGDIRGNLNTRFKRFDESDFDAMILAYAGVHRLNFGDRISEILPHDVLLPAVGQGALGIETRIDDEQTRQIVKVMNNQNSEYCTKAERALLRHLQGGCQIPIGAYATYKNGTLHLSAFVGSVDGKRAIRNEITKENVTAPELAEKTGIELAEELMKQGANEILAEIRKI

SEQ ID NO: 28463 - protein, 361 aa, Burkholderia pseudomallei K96243
MSEKVYRIAVIPGDGIGVEVMPEGLRALDAVSRRFGLRFAYEPIEWASCDYYAKHGQMMPDDWKTQLSGMDALLFGAVGWPETVPDHISLWGSLIKFRREFDQYVNLRPARLFDGVPCPLAGRKAGDIDFMIVRENTEGEYSAVGGTMFEGTEREFVVQQAVFTRHGTERVLKFAFELAQRRAKRLTVATKSNGIAISMPWWDARAAEMAARYPDVAWDKQHIDILCARFVMQPDRFDVVVASNLFGDILSDLGPACTGTIGIAPSANLNPERNFPSLFEPVHGSAPDIAGKHIANPIAMIWSAAMMVDFLGAGTGPAREAHDAIVAAIEHVLKHGPRTRDMGGRASTREVGDAIVAHLLG

SEQ ID NO: 28464 - protein, 461 aa, Streptomyces coelicolor A3(2)
MPAVPERAPVTTRSETQSTLDHLLTEIELRNPAQPEFHQAAHEVLETLAPVVAARPEYAEPGLIERLVEPERQVMFRVPWQDDQGRVRVNRGFRVEFNSALGPYKGGLRFHPSVNLGVIKFLGFEQIFKNALTGLGIGGGKGGSDFDPHGRSDAEVMRFCQSFMTELYRHIGEHTDVPAGDIGVGGREIGYLFGQYRRITNRWESGVLTGKGQGWGGSLIRPEATGYGNVLFAAAMLRERGEDLEGQTAVVSGSGNVAIYTIEKLTALGANAVTCSDSSGYVVDEKGIDLDLLKQIKEVERGRVDAYAERRGASARFVPGGSVWDVPADLALPSATQNELDENAAATLVRNGVKAVSEGANMPTTPEAVHLLQKAGVAFGPGKAANAGGVAVSALEMAQNHARTSWTAARVEEELADIMTSIHTTCHETAERYDAPGDYVTGANIAGFERVADAMLAQGVI

SEQ ID NO: 28465 - protein, 399 aa, Exiguobacterium sibiricum 255-15
MTTVLKFGGSSVATVEQIQSIANYLKNRTEQGEKLVVVVSAMGKMTDSLIAQAQAITDRPERRELDRLLAIGEEQTISLLSIALNSLGIKALSQTGAQAGISTMGLHTKSKIKQIDGELLRKKLETYDVIIVAGFQGVNELGDVTTLGRGGSDTTAVALAAVLDKRCEIYTDVDGVYTADPRIHATAQPIPHISYDEMMEMSALGSKVMEMRSVELGKKYGVHIFVGKTLESERGTWIMEATETMEQKAVTSVSVTKNVLTVSIKHVPQTNSAVADIFELLSGRHVNIDMISQTTFDSDIFLSFSCPLDEEEFLEEALQDIINRFPTVKVDRHNQHAKLSVVGIGMRDATGVASKLFATFRAENITFYQVTTSEISISYTIAQADIERTVAAIAKAFDL

SEQ ID NO: 28466 - protein, 758 aa, Nicotiana tabacum
MGFCSTSTLPQTSLSNSQSSTFFTYLKPCPILSSTYLRPKRLKFRLRISATATIDSPNGAVAVVEPEKQPEKISFGRQYFPLAAVIGQDAIKTALLLGAIDREIGGIAICGKRGTAKTLMARGLHAILPPIEVVVGSMANADPNCPDEWEDGLADRAEYGSDGNIKTQIVKSPFVQIPLGVTEDRLIGSVDVEESVKSGTTVFQPGLLAEAHRGVLYVDEINLLDEGISNLLLNVLTEGVNIVEREGISFRHPCKPLLIATYNPEEGAVREHLLDRIAINLSADLPMSFDDRVAAVDIATRFQECSNEVFKMVDEETDSAKTQIILAREYLKDVTISRDQLKYLVMEAIRGGCQGHRAELYAARVAKCLAAIDGREKVGVDELKKAVELVILPRSTIVENPPDQQNQQPPPPPPPPQNQDSSEEQNEEEEKEEEDQEDEKDRENEQQQPQVPDEFIFDAEGGLVDEKLLFFAQQAQRRKGKAGRAKKVIFSEDRGRYIKPMLPKGPVKRLAVDATLRAAAPYQKLRRAKDIQKTRKVYVEKTDMRAKRMARKAGALVIFVVDASGSMALNRMQNAKGAALKLLAESYTSRDQVCIIPFRGDAAEVLLPPSRSISMARNRLERLPCGGGSPLAHGLTTAVRVGMNAEKSGDVGRIMIVAITDGRANISLKRSTDPEAEASDAPRPSSQELKDEILEVAGKIYKTGMSLLVIDTENKFVSTGFAKEIARVAQGKYYYLPNASDAVISAATKDALSALKES

SEQ ID NO: 28467 - protein, 326 aa, Candida zeylanoides
SIVGRPRHQGIMVGMGQKDSYVGDEAQSKRGILTLRYPIEHGIVTNWDDMEKIWHHTFYNELRVAPEEHPVLLTEAPMNPKNNREKMTQIMFETFNVPAFYVSIQAVLSLYSSGRTTGIVLDSGDGVTHVVPIYAGFSLPHGILRIDLAGRDLTDYLMKILSERGYTFTTSAEREIVRDIKEKLCYVALDYEQEMQTSSQSSAIEKSYELPDGQVITIGNERFRAAEALFRPSELGLEAAGIDQTTYNSIMKCDVDVRKELYGNIVMSGGTTMFPGIAERMQKEITALAPSSMKVKIIAPPERKYSVWIGGSILASLSTFQQMWIS

SEQ ID NO: 28468 - protein, 553 aa, Mycobacterium tuberculosis CDC1551
MTSAPIPDITATPAWDALRRHHDQIGNTHLRQFFADDPGRGRELTVSVGDLYIDYSKHRVTRETLALLIDLARTAHLEERRDQMFAGVHINTSEDRAVLHTALRLPRDAELVVDGQDVVTDVHAVLDAMGAFTDRLRSGEWTGATGKRISTVVNIGIGGSDLGPVMVYQALRHYADAGISARFVSNVDPADLIATLADLDPATTLFIVASKTFSTLETLTNATAARRWLTDALGDAAVSRHFVAVSTNKRLVDDFGINTDNMFGFWDWVGGRYSVDSAIGLSLMTVIGRDAFADFLAGFHIIDRHFATAPLESNAPVLLGLIGLWYSNFFGAQSRTVLPYSNDLSRFPAYLQQLTMESNGKSTRADGSPVSADTGEIFWGEPGTNGQHAFYQLLHQGTRLVPADFIGFAQPLDDLPTAEGTGSMHDLLMSNFFAQTQVLAFGKTAEEIAADGTPAHVVAHKVMPGNRPSTSILASRLTPSVLGQLIALYEHQVFTEGVVWGIDSFDQWGVELGKTQAKALLPVITGAGSPPPQSDSSTDGLVRRYRTERGRAG

SEQ ID NO: 28469 - protein, 111 aa, Medicago truncatula
MEIESAKCECCGLKEDCTQDYISEVKSKFDGKWLCGLCSEAVRDEAIRGKKTFAMEEAIKAHMLFCRKIKSNPAVCVADGMRQILRRRSTELSSSNKHSTRSTSTSQVGGE

SEQ ID NO: 28470 - protein, 366 aa, Oceanospirillum sp. MED92
MSDTNFYTLKIAEVQPETDTAIAVSFAVPAELQDKFNFIQGQFLTLRAEIDGEDVRRSYSICSGVNDGHMRVGIKRVKDGKFSNYANDNFKPGMSVEVMPPQGSFFTEVKADQKKNYMCIAAGSGITPMISIMKTVLSTEPESKVTLIYGNRRSNTVMFKDELNFVKNRYLDRFQWINIMDYEDQGADLLNGRIDNAKGYALQKSGLINIKEVDEAFICGPEAMMSEVSRGFRMEGLTDEHIHYELFASSATDSKAMLEKAAARKEQFGEEKMSKVTVMADGRSVMFDLATVGENILDAGIENGMDLPYSCKGGVCSTCKCKLVKGEVDMDISHGLEQHEIDAGYVLSCQAHPISDEVVLDFDARS

SEQ ID NO: 28471 - protein, 326 aa, Candida glabrata
SIVGRPRHQGIMVGMGQKDSYVGDEAQSKRGILTLRYPIEHGIVTNWDDMEKIWHHTFYNELRVAPEEHPVLLTEAPMNPKSNREKMTQIMFETFNVPAFYVSIQAVLSLYSSGRTTGIVLDSGDGVTHVVPIYAGFSLPHAILRIDLAGRDLTDYLMKILSERGYSFSTTAEREIVRDIKEKLCYVALDFEQEMQTAAQSSSIEKSYELPDGQVITIGNERFRAPEALFHPSVLGLESAGIDQTTYNSIMKCDVDVRKELYGNIVMSGGTTMFPGIAERMQKEITALAPSSMKVKIIAPPERKYSVWIGGSILASLTTFQQMWIS

SEQ ID NO: 28472 - protein, 177 aa, Shewanella oneidensis MR-1
MMKFPLFILTSLMSTSVFAATCPSYLDVEVRKLHSEQSVNLCELTQGKPVLLINTASNCGYTSQFKALEALHKEYKDKGLVVIGFPSDDFFQEENDEKDTAKVCYINYGVTFTMLATSPVRGSDVNSVFKYLGDKAGAPKWNFYKYVVSGDGNTVMQFNSKVKPDSTELKQAIESVL

SEQ ID NO: 28473 - protein, 151 aa, Schizosaccharomyces pombe
IGGAQESLLSRPGQNNLVLKKRFGFVKLAFLTGSSLVPCFAFGESDIFEQVDNNPRTRIYKFQEIVKKIAGFTVPFFYGRGLLNKTFGLMPWRKPINIVVGEPIDVPKKSHPTNQEIYEVHEEYIRRLEGLWNKYKDVFLPNRISELKLSA

SEQ ID NO: 28474 - protein, 148 aa, Oryza sativa (japonica cultivar-group)
MVGVATSAHLHTTTTGRLSCACAPPTRGTRRRRLAVAVRVRVRVRASASEAMATEKLGVRVERNPPESRLSELGVREWPKWGCEKSKFPWTYSAKETCYLLQGKVKVFPDGAGEDFVEIAAGDLVVFPKGMSCTWDVAEAVDKHYKFE

SEQ ID NO: 28475 - protein, 307 aa, Borrelia garinii PBi
MIYTLTLNPSVDYKIVLKEFQEESLNYALNNNFFAGGKGINVSTVLKNLGKSSTALGFLGGFTGDYIKSSLDSKGIKNDFIKIKYDTRLNIKMIANGRETEINANSPDIFENEFKLLKDKLKSLTNNSILVMSGSVPAALGENAYNEISNTISNDVKLIIDTSGKPLKKILRLNPFLIKPNIYELEDLFNAKLNSTKELIKIGKNIVESGVQNIIISMGSDGAIFIGSKNVAFRAFVPKISSASTIGAGDSVIAGFVYAFDNRNTLKDSFKFGVAAGTATALKGSLCEFQDVEKMLCEIGIEDICIS

SEQ ID NO: 28476 - protein, 111 aa, Triticum aestivum
SIRCAHILQKHKESRRPFDSYRNKPVTRTREEARNQINSFIQTLKDHPEKFKEIATSFSECSSCQKGGDLGFFDRGDMQKPFEDAAFNLKVGEMSGLVETDSGCHIILRLA

SEQ ID NO: 28477 - protein, 788 aa, Frankia sp. CcI3
MVSVVSILSILSILSAAAGAHDAPATPACLDGVDTVVSFPLSAVVGMDDLRLALLLNAVSPTLGGILVRGEKGTAKSTAVRGLAALLPPVTVTEGCRFSCAPDAPLPDCPDGPHPAPSPSLTRPARLVELPVGASEDRLTGSLDLDRALADGVSVLRPGLLAAAHRGLLYVDEVNLLGDHLVDLLLDAAAFGVAHVERDGVSVRHPAVFLLVGTMNPEEGELRPQLLDRFGLTVHVAASRDPAVRAEVVRRRLAFEADPAGFAATWADAEAELAARVVAARGRLGTVRLTDAALRAVTAICAGCDVDGMRADVVLAKTAMALAAWAGRATVLAADIRTGARLALPHRRRRGPFDAPGMDDETLDAVLDEALAALDERVGAEREAGECEADEEAGEEAGGSGAGESGAGESGVPVNDARPDDDPPDGGGSGGAPRGDGGSHGCDGAGDGNRGAGNGGDDGNGGDDGKGGDSGDGGDRWSARPSPSASSTATASSTRLAGAPAAASRPRLLTVAGLGTSSGATGRRSPARGSRGALVTTAADAPGLHLPATLLAAAPFQAARGRCGPGLVLVPADRRGAVRVGREGNLVLFVVDASGSMAARARMTLVTTAVLALLVDAYQRRDRIGMITFRGSGAEVVLAPTSSVEVGAARLRALPTGGRTPLAAGLGLAGEVLRAERRRDPTRRALLVVVTDGRATAGDDPLPVARALVRAAGGAAGPATGGRAGTGGRGGGRGELSSVVVDCENGFLRLGLAQRLAGALGGVTIPLDSLHHLTPRATPRATSGKVAC

SEQ ID NO: 28478 - protein, 360 aa, Solibacter usitatus Ellin6076
MANKDYEQRRRSVAAGLRERKLDVLLVSHSPNLRYLSGFTGSNGALLVLPGKSILFTDPRYQIQAAQESSCQIRIVKGPLVTGLLAAIQKLGVKRIGYEPARMTCDFYDALKAGLTLRASLEPVREWIEEMRMVKSEAELALIRRSVETNSRAFEQTIARIKPGIKEQDLAAEFEYRMRRLGAEKPSFESIVATGVRSALPHAQPTAMRLADGDLVVVDMGAFQDGYASDMTRMLSVGPPNSKAKRMYRAVLEAQLAAIDAVRAGAATARVDGAARKVLKSYGLDRAFIHSTGHGLGLEIHEPPRLGKRDKMRLQTGMAITIEPGAYLEGFGGVRIEDTVVVTDTGCEILTPTSKDLYIV

SEQ ID NO: 28479 - protein, 113 aa, Oceanobacter sp. RED65
KHELVTAVIKPFKLDDVREALSEIGVQGITVTEVKGFGRQKGHTELYRGAEYVVDFLPKVKLEIAIDEAQLDKVIEAITEAANTGKIGDGKIFVTNLEQIIRIRTGETGADAV

SEQ ID NO: 28480 - protein, 481 aa, Cryptococcus neoformans var. neoformans B-3501A
MSCPFHTTTNTSNRSPLPDRALLLAMKSQTNTFILGTRKSNLALVQTGHVADDLRRLHSGAGSKFGETREEGDDAEQGDVPFVHPYTFSIESMTTVGDRNQTTPLHLLSPYSSTQPAKSLWTDELEARLINGHFDMLVHSLKDVPTVLKDGCEIGCMAKRHDPRDALVVKQGLPYKRLEDLPDGAVVGTGSVRRVAQLKRAFPNLVFEDMRGNLNTRFNKLDNPQSPFSALILAMSGLERLGMAHRATSPLSSPTLMHAVGQGALAIEIRSTDPRVRNCLRGLGHWQTEWSCGAERGCLRVLEGGCSVPVGVESELVELDEDEVAAHPELLEGVEDPFKGQEESPLEGDSPMLWFSGLVDTTSAPTPSTPTFSSHSLPPLRTRLAKLTLHSCVTSTDGSKHVLFTPPPVLVRSYRQAEQFGEECARRLRGMGAGEILDEINKLRKERELRDLESAIERSRAAQEESEKMGLVQDGTAEVVA

SEQ ID NO: 28481 - protein, 164 aa, Zea mays
VGTRPRLYDSHVWRFSSNGLFSSKSAYRSFYIGAETFEPWKRIWKSWTAPKCKVFVWLSINNKCWTTDKLKKKGLDYPENCVLCDQEDEIVQHILSNCLFTRQFWHNILTAIGLSIVAPKRRDSCFAEWWRNASAKIPESKRKVFNSVDILGPWSLWKHRNVYL

SEQ ID NO: 28482 - protein, 524 aa, Debaryomyces hansenii CBS767
MSTDKLKSYVEEISPYLTQWYVIALGGILVWYIGTSIKAYQFKQKYGCKEPPLVPGGFLSIKLLLDLLKTKSEGTMLEYAEHFFSLVKSQTFKLKLATVPIIFTQDPENIKAVLATQFNDFALGTRHAHFKPLLGDGIFTLDGDGWKNSRLLLRPQFAREQVAHVQTLEPHLQTLAEHISNKKGETFDIQELFFRLTVDAATEFLFGESVYSLRDGTVKDVAPLDFDGKSSFADSFNLSQSYLASRAYSQMFYFLINNKEFRNSNTKVHKFCKHYVEQALATSQDELDKKSKDGYIFLYELVKQTRNPKILQDQLLNILLAGRDTTAGLLSFTFFELARNPDVFEKLKNEIYTHFGDGANPRIETITFESLKRCEYLKFVLNEVLRLYPSVPINFRVSTKDTTIPRGGGPDKQDPVYVAKGTTVAYSVYTTHRLEQYYGKDSREFRPERWAENKKVGWAYVPFNGGPRICLGQQFALTEASYVVVRLIQMFPNLVSRDDRPYPPRKNVQLTMCHQDGVFISLNK

SEQ ID NO: 28483 - protein, 353 aa, Pisum sativum
MAVSAIGFEGFEKRLEISFSDPGLFSDPQGRGLRSLTKSQLDEILAPAECTIVSSLANEDVDSYVLSESSLFVYAYKLIIKTCGTTKLLLSIPPILKLADSISLNVRSVRYTRGSFIFPGAQSFPHRHFSEEVAVLDGFFGKLGSGSMAYILGGSDEAQNWHIYCASSDSVSPEGSVYTLEMCMTGLDREKASVFFKEQTGSAAEMTVNSGIRKILRNSEICDFDFEPCGYSMNSVEGSAVSTIHITPEDGFSYASFETAGYDLKAINLNEMVMRVLACFQPTEFSVAVHVDNASKSFEQGCLLDVKGYCCEEKSHQGLGMSGSVVYQKFLKTSYCGSPRSTLKCWKDEDEEE

SEQ ID NO: 28484 - protein, 222 aa, Brassica napus
  misc_feature (166)..(166): Xaa can be any naturally occurring amino acid
  misc_feature (193)..(193): Xaa can be any naturally occurring amino acid
  misc_feature (212)..(212): Xaa can be any naturally occurring amino acid
MGKGPLSFRRLSSIRRRKKGSSVKDDPNQSSNPSSPPPPSPINAGGSVAAGTTGKVKKKAGGARLWMRFDRTGAMEVVECDKSTIIKRSSVPARDLRILGPVFSHSSNILAREKAIVVNLEVIKAIVTAEEVLLLDPLRPEVLPFIDRLKQQFPQRNALEATPNVXTFDPEAGEGLQSELPFEFQVLEMALEXVCSIVDTSVASLETDAWPXLDELTKNVST

SEQ ID NO: 28485 - protein, 313 aa, Prosthecochloris aestuarii DSM 271
METLHCDVAIIGGGPAGCSAAIYTARADLDTVIIDKDPHAGALGMAHIIANYPGMGNDITGMELLESMRRHAGSFGARFMKQKVNGIDVRNPEKTVFTTSGTMFKAKALILATGSMGKSRELPGEKELLGAGVSYCATCDAAFYRQKVVAVAGRTREAVEEALVLSRFASKVYLFCPTASLTAPPEDIHMLQEQKNIEVFYSRRLDAINGGKFVESVTLGAPEEVVAVDGVFLYLTGSAPVLDFTGGQLDVCQSGCLQVDKDFMTSVPGVFAAGDILCKEVKQAVIVASEGCRAALQVDKFLRGRDRARSDYQ

SEQ ID NO: 28486 - protein, 474 aa, Desulfotalea psychrophila LSv54
MLRCYPRTEKEKRMPLHNKRKNNIMDDIYASSDLSIVLPKYKMPQKELDPRHAYQMVHDELMLDGNARQNLATFCQTWDDPEVHRLMDECIDKNMIDKDEYPQTAEIESRCVHILADLWNAPDSANSLGCSTTGSSEAAMLGGLALKKRWSEKRKAAGKGTDRPNIVCGPVQICWHKFARYWDVELREVPLEDQLYMTAEEAVKRCDENTIGVIPTLGVTFTCVYEPVEEICRALDQLQKETGLDIPVHVDGASGGFLAPFVDPDLKWDFRLKRVKSINASGHKFGLAPLGVGWVLWRDKEELPEDLIFWVNYLGGNMPTFALNFSRPGGQIIAQYYNFLRLGHEGYRKIHQACYKTAQYLSSEVKKLGPFEIIYDGRGGIPAMSFSLQEGVAPGFNLFDLSDRIRSRGWQIAAYSMPANREDLVVMRILVRHGFSRDLADLLLKDLQHCLEYFKKNPVIHQSSEEFSGSFKHS

SEQ ID NO: 28487 - protein, 302 aa, Leptospira interrogans serovar Copenhageni str. Fiocruz L1-130
MGFGGGSPLVSETNKQAAAITQILKKITGEIWESSVTMTCGYPNIRDIPAEFLIPSNKNIIFPLYPHFSRSTVLSTAKLIEQIVGFCPVGAKGWITPFHSSQIYLESIRDLILDFFQGKLNRENFLHSNSFQEIPDWKTIDLVFSAHGIPIRLIQKGDHYKEEIDSNITNLKKLLYKNGFSGECHTSFQSRVGPSKWTEPNTIQMLEDLGKKGVKRVAVYPISFVSDHLETLEEIGEQLKKVAYQNGILEYYRIPAPGIYPKFIKAMAKIALESSQTSKKECLCKKLGGYNLNSVVCTRLIS

SEQ ID NO: 28488 - protein, 421 aa, Magnetospirillum magnetotacticum MS-1
MSEIRETRLNSGLKIVTDPMETVETVSLGVWVDAGTRHEPVEINGVSHLLEHMAFKGTARRSALDIAEEMDAVGGHLNAYTARDHTAYYAKVLKEDAALALDIISDILQNSTLEAEELGREQAVVVQEINQAIDTPDDIIFDHFQATAYPDQPLGRPVLGSEELVRAMSRDQVMGYMRGNYSAPRMVLSASGRIDHDHLVATAGAAFSQLPPHHAAVTDQARYVGGDFREERSELEQVHVVVGFDGVAYDDPDYYSASVLSTLLGGGMSSRLFQEVREKRGLVYSIYSFASSYNDGGLFGVYAGTGEDEVAELIPVMCDEIVKVCGGVNDAEVQRARAQLKASILMSLESTTSRCEQLARQVVIYGRPVPVAEVVEKVEAITAEDCARVARRLFAGTPTFAAIGPLGKVESFERVAERLRP

SEQ ID NO: 28489 - protein, 483 aa, Xylella fastidiosa 9a5c
MLKKHLFIVKPIEPTNHTGTGKGETQLKRSLTAGQLVMLGIGAVIGAGIFVLSGHAAAEYAGPAVVLSYILAGIACALAGLCYAEFAAMLPVSGSAYSYAYATLGEFTAWFIGWNLVLEYMFSASTVAVGWSGYLNSFLSSFGYGLPASLSSAPLDVVDGRLIYSGGLINLPAVAIVAAISGLCYVGITQSAFVNSITVAIKVSVIVLFIAFAARYVNPDNWVPFVPDNAAPGKYGMEGVIRGAAVVFFSYIGFDAVSTTAGEAKNPQRDMPIGILGSLAICTVIYIAFSGVLTGLMHYSQLDTPKPVATALETYPTLSWLKHVVEIGAIAGLSSTMLMMLMAQPRIFYAMSQDGLLPKLLSKVHPKFQTPHVGTLLVGACACTLAGLFPISLLGDLVSMGTLLAFATVCIGIVVLRRTRPDLPRPFRVPMYWVIAPAGAAACLYLFWQPFTEHWPLMVGWTVLGLVMYGLYGYHHSKLRRGG

SEQ ID NO: 28490 - protein, 318 aa, Idiomarina baltica OS145
MAEAKHCKLLILGSGPAGYTAAVYAARANLDPVLVTGMQQGGQLTTTTDVENWPGDAEGLTGPDLMVRMQQHAERFDTEIVFDHINKVDFSERPFRLKGDVGEYTADSVIISTGASAKYLGLDSEEAFMGKGVSACATCDGFFYKNQKVCVVGGGNTAVEEALYLSNIASEVHVIHRRDTFRSEKILSDRLMEKAENGNVTLHLNKTLDEVLGDDSGVTGVRIKDTKDGSTSELDVAGCFIAIGHQPNTGLFDGQLEMNNGYIVVQSGLEGNATATSIPGVFAAGDVMDHVYRQAITSAGTGCMAALDAERYLDALTK

SEQ ID NO: 28491 - protein, 477 aa, Xylella fastidiosa 9a5c
MFKQLWATKLSQPSQDSAEGLSLQRVLGVWGLTALGIGAVIGGGIFVITGQAAANHAGPAIMLSFALAAICCTFCALAYAEFAAMVPVSGSAYTYTYATFGELAAWFIGWMLVLEYGVSAAAVAVSWSGYFLSLLQHLGIDLPAALVNAPLDGTLHATGAIANLPAATIVLLLTWLCYFGIRKSSKINIAMVALKSGLILLIIGVGWKYVNPDYWQPFIPPNQGPGKYGWDGVLHGASMVFFAYIGFEAVSVAAQESHRPQRDLPISMMSALAICTVLYIMMAAVMTGLVPYTQLGTDEPVVTAVAAHPQLGWLRVVVEIGALVGLSSVVLVMLIGQPRIFMIMAGDGLLPPIFSTIHSKHRTPHINTVITGLGIALLAAVFPLDVLGELTSMGTLIAFAAVCAGVLILRCTRPDLPRPFRMPAAWLFCSAGVLSCITLLSAMTRHNWMLMSVWTVLGFALYFGYGYRHSKLHREST

SEQ ID NO: 28492 - protein, 555 aa, Candida glabrata CBS 138
MASSNTYSNFKLATELPAWSKLQKLYDAQGKSLNVKEEFQKDSARYNKYAKTLTNYDGSKILFDFSKNLINDEILATLIELAKEAKVTDLRDAMFAGEHINFTEDRAVYHVALRNRANKPMKVDGVDVAPEVDAVLQHMKEFSEQVRSGEWKGYTGKKITDVVNIGIGGSDLGPVMVTEALKHYAGVLDVHFVSNIDGTHIAEVLKVVDPETTLFLVASKTFTTAETITNANTAKNWFLSKTGNDQSNIAKHFAALSTNETEVAKFGIDTKNMFGFENWVGGRYSVWSAIGLSVALYIGFDNFEAFLKGAEAVDKHFVETPLEDNIPLLGGLLSVWYNNFFGAQTHLVAPFDQYLHRFPAYLQQLSMESNGKSVTRGNVFSTYSTGSILFGEPATNAQHSFFQLVHQGTKLIPSDFILAAQSHNPIENNLHQKMLASNFFAQAEALMVGKDEAQVKSEGATGGLVPHKIFSGNRPTTSILAQKITPAALGSLIAYYEHVTFTEGAIWNINSFDQWGVELGKVLAKVIGKELDNTEKITAHDASTNGLINQFKEWL

SEQ ID NO: 28493 - protein, 442 aa, Bradyrhizobium japonicum USDA 110
MLDETAGRAPGGAARWWLAQSLRALGAEIAARGGSLILRKGPAAGVIPEEARESGARAVYWNGIAQAPHQAIERRLEAALAKLGVDSQSFPGDLLVPPSAIRNKEGRGLRVFTPFWRRVLSLGDPPKPLPAPKQLRPGPKIVSDRLESWQLAPTKPDWAGGLRERWTPGEASARARLRDFLKTIARGYAGDRDRPDRVGTSGLSPHLRFGELSPRQVWHAARFAAAEDAALGPGIEKFLSELGWREFCRHLLHDHPDLATENLQTNFDGFPWQSDGKVLAAWQRGRTGYPIVDAGLRELWHTGVMHNRVRMVVASFLVKHLLIDWRDGEAWFWDTLVDADAGSNPANWQWVAGCGADAAPYFRVFNPQLQGEKFDPDGTYVRRWVPELQGLPAKLIHQPWQATPNELASAGVTLGKTYPQPIVDHARGRERALSAYAKIRKG

SEQ ID NO: 28494 - protein, 556 aa, Burkholderia sp. 383
MSRRGIPPDSRFTRTAMTLNSLPAWTALQSHFEQIRHARLRDWFAPENDHTPTRAERFTIPGGGIAADFSKNRINDDTLRLLVQLARDAGVEARRDAMFAGEIVNPTEGRAALHTALRATDPQAPFHAQISAERAKMATFARAVRSGTWTGYTGKRIRHVINIGIGGSDLGPKMVVHALHHVATPEITTHFVSNVDGADLARVLEQVDPEETLAIIVSKTFTTLETMTNARSLRDWFVARGCPEDALAKHFVGVSANPAEVVKFGIAADNVFEMWDWVGGRYSLWSAVGLSIMIAIGPEQFDELLAGANDMDRHFREAPLERNLPVLLGLIGIWYRNFFGSQSYLVAPYSEALHYLPSYLQQLEMESNGKSARLDGTFVDYPTSAVTWGEPGTNGQHAFFQMLHQGPTIVPIDFIAVLTPEHPLASHHPKLLANCFAQSEALMLGRTLDEARKVAGPGKEALAPHLTFPGNRPTTTLLVDALTPRTLGALIALYEHKVLVQATVWDINPFDQWGVELGKILGKVVEADLSAESIDPAKHDSSTTALIERARAALKR

SEQ ID NO: 28495 - protein, 76 aa, Zea mays
  misc_feature (56)..(56): Xaa can be any naturally occurring amino acid
HASSHASGHASVHAFDHAFGHASDTAVSKRPALTVHTIGPCFFRVPHLKEDETPPXGGTPGWAAISSARIGPWLRL

SEQ ID NO: 28496 - protein, 406 aa, Arabidopsis thaliana
MSAILQGAGAATALSPFNSIDSNKLVAPSRSSLSVRSKRYIVAGSDSKSFGSSLVARRSEPLIPNAVTTKADTAASSTSSKPGHELLLFEALQEGLEEEMDRDPHVCVMGEDVGHYGGSYKVTKGLADKFGDLRVLDTPICENAFTGMGIGAAMTGLRPVIEGMNMGFLLLAFNQISNNCGMLHYTSGGQFTIPVVIRGPGGVGRQLGAEHSQRLESYFQSIPGIQMVACSTPYNAKGLMKAAIRSENPVILFEHVLLYNLKESIPDEEYICNLEEAEMVRPGEHITILTYSRMRYHVMQAAKTLVNKGYDPEVIDIRSLKPFDLYTIGNSVKKTHRVLIVEECMRTGGIGASLTAAINENFHDYLDAPVMCLSSQDVPTPYAGTLEEWTVVQPAQIVTAVEQLCQ

SEQ ID NO: 28497 - protein, 549 aa, Buchnera aphidicola str. APS (Acyrthosiphon pisum)
MKNINFNNTQSYQDLKNHFRKIKNIHLRDLFASDLNRFKKFSIIFENEMLIDFSKNRITDETLIYLLNLAKETDVKSGIKLMFSGAKINKTENRSVLHIALRNRTNRPIILNNCNIMLEVNALLEKMKNFSKMVIHGEWKGYTGKSISNVVNIGIGGSDLGPYMVTEALRPYKNHLNMYYVSNIDGTHLTEVLKKINPENTIFLIASKTFTTDETITNAHSAKKWFLHYSQDQSALDKHFFALSANIKNALNFGININNIFKFWDWVGGRFSLWSSAGLSIMLSIGFDNFEKFLDGAHAMDNHFYHTNYKENIPILLALISIWYTNFFGSETEAIFPYDQYMHRFSAYFQQSNMESNGKSINRNGQRINYQTGPIIWGEPGTNGQHAFYQLIHQGTRLIPCDFIAPVFSHNDLNNHHMKLISNFFAQTQALAFGQSRDSILHRLILSKKNQDDIKRILPFKICKGNQPTNSILIRKITPYNLGALIALYEHKIFVQGYILNIFSFDQWGVELGKELSQNIYNYLNINVKNKSYDASTEGLINFYKSFMI

SEQ ID NO: 28498 - protein, 532 aa, Solanum tuberosum
MGVCLSKSKPAESKSDGHYRSGGSDGGGVGGKGHNHGTHQAQIQYTKSPGPETQLPLRPQASPKPVFKQETILGKAFEDVKAHYTLGKELGRGQYGVTFLCTEIATGHQYACKSISKKKLVTKSDKADMRREIQIMQHLSGQPNIVEFKGAYEDKNSVCLVMELCAGGELFDRIIAKGHYTERAAASMCRAIVNVVHVCHFMGVMHRDLKPENFLLSDKSENAALKATDFGLSVFIEEGKVYKDIVGSAYYVAPEVLRKSYGKEIDVWSAGVMLYILLSGVPPFWAETERGIFDAILKEDIDFESQPWPSITSSAKDLVRKMLNKDPKQRISAAQVLEHPWLKVGGVASDKPLDNAVLSRMKQFRAMNKLKRLALKVIAENLSADEIQGLKSMFHNIDTDNSGTITYEELKSGLARLGSKLTEAEVKQLMEAADVDGNGSIDYIEFITATMHKHRLERDENLYKAFQYFDKDGSGFITRDELETSMEEHGIGDPASIREIIAEVDADNDGRINYEEFCTMMRSGAKQPGKLF

SEQ ID NO: 28499 - protein, 303 aa, Mycobacterium tuberculosis CDC1551
MTHMSIFLSRDNKVIVQGITGSEATVHTARMLRAGTQIVGGVNARKAGTTVTHEDKGGRLIKLPVFGSVAEAMEKTGADVSIIFVPPTFAKDAIIEAIDAEIPLLVVITEGIPVQDTAYAWAYNLEAGHKTRIIGPNCPGIISPGQSLAGITPANITGPGPIGLVSKSGTLTYQMMFELRDLGFSTAIGIGGDPVIGTTHIDAIEAFERDPDTKLIVMIGEIGGDAEERAADFIKTNVSKPVVGYVAGFTAPEGKTMGHAGAIVSGSSGTAAAKQEALEAAGVKVGKTPSATAALAREILLSL

SEQ ID NO: 28500 - protein, 644 aa, Burkholderia sp. 383
MLDFFRNHQRLMMALLLLIVLPGLGFVGIQGFRGFFDDSANVAAVNGHKITRVEFDGAFRQQIDQARQALGGQFDIKMFDTPEHRKQVLDGLIQQRVLADETQRLHLTASDNAVRDALMSDPMIASLKKPDGSIDVERYAQLLSFQGMTPEQYQERVRYSLSLQQIPASIVSSAFTPKSLAQRLSELAAQQREVQALVLKTSDFAAKVQPTDAQLAAYYDAHKQSFATPETATIQYLVYSPAAAAASAQPTDADIKKFYDDNPTHFRTEAQVRVSHIFIAAPGSASAADKTAAKTKAEQLLADVKAHPDQFAQVAQKSSQDAPSAAKGGDLGFITRGSTAGGKAFDDAAFALKQGDVSGVVQSDLGFHILKATEVKPAAVKPFADVKDQIAAELKQQYASKAFTDNAEGFTSTVYEKAKTLQPAADKYKLTIQTATVTPTPNPQLPPTSPLNNPKFLAAVFANDSVKSQNNTQAIDIGNNTLISARVTDYKPAAVPALDAIKDVVRQKVVAEQAAELAKKDGVAKLAELQKSKSADGFAAAQKVSRTQSQGLTPAALSAVYKVDAKTLPAYVGVDLGADGYAIYRVNAVIPGSAVDPQQLAAAQQQMAQVDAQSEGEAYLAALRDRSKVKLYGSTAGQSQDGDN

SEQ ID NO: 28501 - protein, 81 aa, Triticum aestivum
  misc_feature (58)..(58): Xaa can be any naturally occurring amino acid
MAEESGRPLPKFGEWDVNDPASADGFTVIFNKARDEKKGGNGQDTDSPSKDPRTERVXESYAAKPSTKKWFCCVTASPTQS

SEQ ID NO: 28502 - protein, 348 aa, Caulobacter crescentus CB15
MSPLRRIHTISPPMSTLSPRQTRCLIIGSGPAGYTAAIYAARALLKPVLIAGIQPGGQLTITTDVENYPGFADVIQGPWLMDQMRAQAEHVGTEFVSDIVTSVDLSKRPFTVKTDSGQDWIAETIIIATGAQAKWLGLESEAKFQGFGVSACATCDGFFYRNKDVIVVGGGNTAVEEALFLTSFASKVTLVHRKDELRAEKILQERLLAHPKIEVIWDSVIDEVLGQTDPMGVTGARLKNVKTGETQEVAADGVFIAIGHAPSSELFAGQLETGSGGYLKVKPGTASTAIEGVYAAGDVTDDVYRQAVTAAGMGCMAALEAVRFLAEEDHKAAHHPISHAEANKIGVW

SEQ ID NO: 28503 - protein, 148 aa, Solibacter usitatus Ellin6076
MAEADLIRCPACGATNRVPREKIAQGLQPVCGQCKAGLPVDSSPIVVTDKTFAAVVEQSAVPVLVDLWAPWCGPCRMVAPAVEALAAEMAGRLRVAKINVDDNPGVSSRFNVQSIPTLLLIRGGREVNRLVGAQPKQDIARWLARSLG

SEQ ID NO: 28504 - protein, 317 aa, Brassica napus
MATGQLFSRTTQALFYNYKQLPVQRMLDFDFLCGRETPSVAGIINPGSEGFQKLFFGQEEIAIPVHAAIEAACAAHPTADVFINFASFRSAAASSMAALKQPTIKVVAIIAEGVPESDTKQLIAYARANNKVVIGPATVAGFQAGAFKIGDTAGTIDNIIQCKLYRPGSVGFVSKSGGMSNEMYNTVARVTDGIYEGIAIGGDVFPGSTLSDHILRFNNIPQIKMMVVLGELGGRDDYSLVEALKQGKVHTPVVAWVSGTCAPLFRSEVQFGHAGARSGGEIESAQSNIYTLMDAGAIVPTSFDALESAIMETFEKL

SEQ ID NO: 28505 - protein, 588 aa, Corynebacterium efficiens YS-314
MITRLSTLFLRTLREDPADAEVPSHKLLVRAGYIRRVAPGVYSWLPLGLRALRNIEQVVREEMDAIGGQELLFPGLLPREPYETTQRWTEYGDSLFRLKDRKGADYLLGPTHEEMFASTVKDLYSSYKDFPVTLYQIQTKYRDEERPRAGILRGREFVMKDSYSFDMTDAGLEESYARHRAAYQRIFDRLGIEYVICKATSGAMGGSASEEFLAVSANGEDTFVRATDGDFAANVEAVVTQPGQERPIEGLPEAVVHETPVSETIETLVAWANSIGVTVDGREVQASDTLKCIVVKTREPGAEEWELTGVLVPGDREVDMKRLEASLEPAEVELAVEADFAKYPFLVKGYVGPVGLARNGVRVLADPRVVTGTSWITGADEKERHVVGLVAGRDFTPDGFIEAAEIREGDPAPEGQGTLTLARGIEIGHIFQLGRKYTEAFDVQILDENGKRAIPTMGSYGIGVSRLLAVLAEQRHDEAGLNWSPAVAPYQVHVVAANKDAAAIEAAERYATELSQAGIDVLFDDRPKVSPGVKFKDAELLGMPFALILGRGYADGTVELRVRGGEKTELPVDEAVETIVRLVNEARG

SEQ ID NO: 28506 - protein, 165 aa, Vibrio fischeri ES114
MEYNTSALCDIYLDQVDVVEPMFSHFGAKTSFSGQITTIKCFEDNGLIHQLLEEKGEGRVLLVDGGGSLRRALVDADLAAKAAHNGWEGLVIYGCVREVDYLEEIEIGIQALASIPVGAARQNIGEVDVAVNFGSVTFLPEDHLYADSTGVIISQEPLEEMGEEE

SEQ ID NO: 28507 - protein, 451 aa, Exiguobacterium sibiricum 255-15
MNIICWIRSDFRLEDNHMLARAVEYLEKDEQANVEFVFWVNPDYIGEYDARQQYFFQALEHFAKNCKTHDMPIRFIEGQEKDFLEATEMADVLLFNAEYVEPFKSRDDGIMKKRGDKKTERLLDRHLLHPHAVKKNDGSYYKVFTPYKNAFLKKDVDKPYPVKLNLLKERYHKRRQNNAFMLDYFKRAASDTDFAVGEETARKRLRSFLKNNLSAYEEQRDLPAVDGTSLMSRYLRTGEIGIRTIFDAVQQEQDSKGKQTYLTELIWREFYYTILMHYPESKRLPVNEQYTKIEWETDEKGFKAWAEGKTGYPIVDAAMRQLNTTGWMHNRLRMIVASFLTKDLLVDWQKGERYFQQKLVDYEAASNIGGWQWAASVGTDAVPYFRVFNPTTQSKKFDKDGTFIRTYLPELKDLPKTSIHEPTEQQRKDYDYPMPIVEHDMARKRAIARFK

SEQ ID NO: 28508 - protein, 249 aa, Kineococcus radiotolerans SRS30216
MDERDEQDKQTSAMDAATQAGWSHRHRDVSGGWLRPTVFGAVDGLVTNASLIAGVGGGGVSAHTVVLTGLAGLVAGAFSMGTGEYVSVTNQNELVHAEVAVERRMHERFPEAEQAELEQTFRGYGADEETAARMAAAVSADPEQALRVHTREELGVDSQDLPSPVLAGAASLAAFSVGAVLPLLPYLLGHASLVAAMVITALALVGGGTAVGRLTGRPLAFSGLRQLALGAVAVAVTYGIGRLVGGTVA

SEQ ID NO: 28509 - protein, 366 aa, Eurotium herbariorum
MAEFVRATIFGTTFEITSRYTELQPVGMGAFGLVCAARDQLTGAPVAVKKIMKPFSTPVLSKRTYRELKLLKHLGHENIICLSDIFISPLEDIYSVTELLGTDLHRLLTSRPLEKQFIQYFLYQILRGLKYVHSAGVVHRDLKPSNILINENCDLKICGFGLARVQDPQMTGYVSTRYYRAPEIMLTWQKYDVEVDIWSAGCIFAEMLDGKPLFPGKDHVNQFSIITELLGTPPDDVIETICSENTLRFVKSLPKRERQPLTSRFKNADPEAVDLLERMLVFDPKKRIRAGEALAHEYLAPYHDPTDEPEAQEKFDWSFNDADLPVDTWRIMMYSEILDFHNIDQSEDAGQVLVEGVGDGQQAFAA

SEQ ID NO: 28510 - protein, 619 aa, Oryza sativa
MEAAALSTVLYVLALVVADADHHVVRVQGRRHQCQPFSCGHLQNVSYPFRRRGDPRSRRCGFRSYELDCSSDDGKATIRINTGKYYVSSINYTASIFWVVDANLQDDANSSCPLPRSDQLPYVGLGIPGSHDSWDLGLDDMITWVGFVNCSQELITNSSSKYLYVYHPVDCLTTALSFVYYMLPFFGSLVPSVEDIEPSCGYLAMTPIGGGWNSVNLPEYTSYAEVVKSMRGGFAVKFPTPWLNWFGLIKKCLNKSVSIHYQAGHTTYCIAKFISLFVCSAMQVCVRTVGRDDFSYSQGQGGYGSVYKGVFLPGDVHVAIKMLDGNSNCNGEDFISEVATIGRIHHINVVRLVGFCSEEMRRALVYEYMPRGSLNKYIFSSERSFSWDKLNEIALGIARGINYLHQGCEMQILHFDIKPDNILLDDNFVSKVADFGLAKLYPREKSFVSDRALRGTVGYMAPEMVSRSFGVISDKSDVYSFGMLLLEMAGGRRNADPNANSNASRAYYPAWVYDQLIADQQVDEISNVADMHELERKLCLVGLWCIQMKSHDRPTMSEAIEMLEGDVDALQVPLRPFFCDGDGIGNGMPPPQVMDSYFHSSELTAISEEDDGIAELASS

SEQ ID NO: 28511 - protein, 465 aa, Arabidopsis thaliana
MDGEELTEQETALYDRQIRVWGANAQRRLTKAHILVSGIKGTVAEFCKNIVLAGVGSVTLMDDRLANMEALNANFLIPPDENVYSGKTVAEICSDSLKDFNPMVRVSVEKGDLSMLGTDFFEQFDVVVIGYGSRATKKYVNEKCRKLKKRVAFYTVDCRDSCGEIFVDLQDYKYTKKKLEEMVECELNFPSFQEAISVPWKPIPRRTAKLYFAMRVIEVFEESEGRKHGECSLLDLARVLEIKKQLCEANSVSESHIPDILLERLITGTTEFPPVCAIVGGILAQEVIKAVSGKGDPLKNFFYYDGEDGKEREESSSHEHLKEKLRELEEEWTAMKTGKNSSAVSWITVEDALEYVENSPRNLMLSLQHKPKAEMIQEISPLRRKLFHDSDDDDQTKKTTLLSHSSCWSSNVTSSSDTTKAKKKTTIRRFVSVTMVLLLSWVLVVLMNHFDHLSMNTQIITLVPT

SEQ ID NO: 28512 - protein, 395 aa, Arabidopsis thaliana
MTTMGDLPGDLVEEILSRVPLTSLRAIRSTCQKWNSLSKSQICGRKATAAENKFLGFMMKDSRVCSMKFDLQGIRNDDGELVEPSIKQVSKLDQIEVSQVFHCDGLVLCIIKDNTGLLVWNPYLGQTRWIHPRNNYQIEDRYALGYDNNRNHKILRIFDLYPSSNRVFGYEVYDFSSNSWKVLDVIPEWDIQSHFRGASLKGNAYFPAQKKETVGGIKTINIEDVLLCFDFTRERFGPPLPLPFHSYNADFFVSLACVREEQLAVLYQRWGAFETIEICVTNKIDPNTVSWSKFLITSTGFPVDTFSGSFFIDEEKKVAVVFDLDRYKPTETCRYQIVYIIGQDEYFKSVNMGVAPNIAKNSYQAYCVPLVCSSSYVPSLVQLQINKPGKRKESN

SEQ ID NO: 28513 - protein, 523 aa, Datisca glomerata
MPAVGGIVVGGSKKEYPGNLTPYVTITCIVAAMGGLIFGYDIGISGGVTSMDSFLKKFFPAVYRKKELDSTTNQYCQYDSQTLTMFTSSLYLAALLASIVASTITRKFGRRLSMLFGGILFCAGAIINGFAQAVWMLILGRMFLGFGIGFSNQSVPLYLSEMAPYKYRGALNIGFQLSITIGILVANVLNYFFAKIRGGWGWRLSLGGAMVPALIITVGSLLLPDTPNSLIERGNRDEARSKLQRVRGVDDVDEEFNDLVAASEESKQVEHPWTNLLRRKYRPHLAMAILIPFFQQLTGINVIMFYAPVLFNTIGFGSDASLMSAVITGCVNVAGTLVSIYGVDKWGRRFLFLEGGFQMLICQAVVAAAIGAKFGVNGNPGELPKWYAIVVVLFICIYVAGFSWSWGPLGWLVPSESFPLEIRSAAQSINVSVNMIFTFAIAQIFLTMLCHLKFGLFIFFAFFVVVMSIFVYFFLPETKGIPIEEMGRVWKSHWYWSRFVTDADYTIGSGVEMGKGAQELKNI

SEQ ID NO: 28514 - protein, 289 aa, Arabidopsis thaliana
MTSSVLTPSLKLLAMTNSSSSTLFCIPSIFNISSSESHRFNFSLSSRPVNLTLSLKSKTLRNSSPVVTFVSQTSNWAEEEEGEDGSIGGTSVTVDESFESEDGVGFPEPPEEAKLFVGNLPYDVDSQALAMLFEQAGTVEISEVIYNRDTDQSRGFGFVTMSTVEEAEKAVEKFNSFEVNGRRLTVNRAAPRGSRPERQPRVYDAAFRIYVGNLPWDVDSGRLERLFSEHGKVVDARVVSDRETGRSRGFGFVQMSNENEVNVAIAALDGQNLEGRAIKVNVAEERTRR

SEQ ID NO: 28515 - protein, 963 aa, Arabidopsis thaliana
MAARNLEKMASIDAQLRLLAPGKVSEDDKLIEYDALLLDRFLDILQDLHGEDVREFVQECYEVAADYDGNRNTEKLEELGNMLTSLDPGDSIVVTKSFSNMLSLANLAEEVQIAYRRRIKKLKKGDFADEASATTESDIEETLKRLLQLNKTPEEVFDALKNQTVDLVLTAHPTQSVRRSLLQKFGRIRDCLTQLYAKDITPDDKQELDEALQREIQAAFRTDEIRRTPPTPQDEMRAGMSYFHETIWKGVPKFLRRVDTALKNIGINERVPYNAPLIQFSSWMGGDRDGNPRVTPEVTRDVCLLARMMAANLYFSQIEDLMFEMSMWRCNEELRVRAERQRCAKRDAKHYIEFWKQIPANEPYRAILGDVRDKLYNTRERARQLLSSGVSDVPEDAVFTSVDQFLEPLELCYRSLCDCGDRPIADGSLLDFLRQVSTFGLALVKLDIRQESERHSDVLDAITTHLGIGSYKEWSEDKRQEWLLSELSGKRPLFGPDLPKTEEVADVLDTFKVISELPSDSFGAYIISMATAPSDVLAVELLQRECGITDPLRVVPLFEKLADLESAPAAVARLFSIEWYRNRINGKQEVMIGYSDSGKDAGRLSAAWQLYKTQEELVKVAKEYGVKLTMFHGRGGTVGRGGGPTHLAILSQPPDTIHGQLRVTVQGEVIEQSFGEEHLCFRTLQRFTAATLEHGMHPPVSPKPEWRVLMDEMAIIATEEYRSVVFKEPRFVEYFRLATPELEYGRMNIGSRPSKRKPSGGIESLRAIPWIFAWTQTRFHLPVWLGFGGAFKRVIQKDSKNLNMLKEMYNQWPFFRVTIDLVEMVFAKGDPGIAALYDRLLVSEELQPFGEQLRVNYQETRRLLLQVAGHKDILEGDPYLRQRLQLRDPYITTLNVCQAYTLKQIRDPSFHVKVRPHLSKDYMESSPAAELVKLNPKSEYAPGLEDTVILTMKGIAAGMQNTG

SEQ ID NO: 28516 - protein, 138 aa, Shorea singkawang
EKNIPVLLGLLSIWNVSFLGYPARAILPYSQALEKFAPHIQQVSMESNGKGVSIDGVPLPYEAGEIDFGEPGTNGQHSFYQLIHQGRVIPCDFIGSAKSQQPIHLEGEVVSNHDELMSNFFAQPDALAFGKTPEELHK

SEQ ID NO: 28517 - protein, 374 aa, Arabidopsis thaliana
MTMMSDLSEDLVEEILCRVSITSLGAVRSTCKGWYVLSKTRVLCKAETKHQFLGFMKKNYKLCSMRFDLHGNFNEEGGEEFMNPSIKKSGNLLDQLDICKVFQCDGLLLCVTKEENTRLVVWNPYSGQIRWIKCNNSYHRYEGYAIGYNNNRKHKILRFSDMSFSTYKIYDFISNSWRVLDIAPNWHINPDQRGASLKGNTYFFAREKREDEEDEDILWQPVEYLLCFDFTTENFGQLHPLPFEQYIDDAGALSSFGEEKLAALFQSFASSVVEIWVTSMIEANAVSWIPFLKVDMKPHCSFRFRLPFDGGSFFIDEEKKVAVVIHVDVVAESEMNRYEDVAYIIGENGSYVPSLAQINQSVEFENEREEEEAN

SEQ ID NO: 28518 - protein, 297 aa, Synechococcus sp. CC9605
MYTARSNLSTIILDKNPAVGALAITHKIANYPGVEGDTSGEALLKTMRVQAFNYGAEYKQAQVYGINMTDSEKTVYTPEGTFVGKTLVLATGAMGRESTLPGENEFLGKGVSYCATCDGAFYKNQEVAVYGSNHEAIDEALVLTKFASTVHWITNNKPNGNSPAVEILLNSKNVKHWKRTRLTSIQGDDQGVNAVKVQLSGGREEQMIQVQGAFVYSTGSLPITDYLQEQVPVNPNGGVRVNSDMMTNLEGVWAIGDIRNTPFKQAVVACSDGCIAAMAIDKYLNKRKDVRVDWVHR

SEQ ID NO: 28519 - protein, 223 aa, Arabidopsis thaliana
MVTLSSPSPSLSCVENVTCKSSHVSRVLISGTDNINHGESSEAKILRDVHISERLLEDFTELARENTEKDLETCGTLAAFLERGIFYVTTLIIPKQESTSNSCQAMNEVEVFSIQNERELYPVGWIHTHPSQGCFMSSVDLHTHYSYQVMVPEAFAIVVAPTDSSKSYGIFKLTDPGGMEVLRGCSETGFHPHKEPEDGNPVYEHCSNVYKNSNLRFEIFDLR

SEQ ID NO: 28520 - protein, 115 aa, Leonurus japonicus
MAALIKLMCTMLIVAAVVAPLAEAAIGCNTVASKMAPCLPYVTGKGPLGGCCGGVKGLIDAARTTPDRQAVCNCLKTLAKSYSGINLGNAAGLPGKCGVSIPYQISPNTDCSKVH

SEQ ID NO: 28521 - protein, 251 aa, Schizosaccharomyces pombe
MKPDTVSLTRAFSKATSTSSKAALSWLKKYNFDYDVAYTKWIQQKSREEAEKQLNNVFSQFSSKEDKDLIELDGSVQLFTALDISLEDPETLLVSYFLKSPRMGEFHRESFVEGALNLSTTSLDQLKLAIKEKVQVWRSDASLQKAIYIYTYPLACDKGKKTLSTSIAIEFFQILLKDTFPLLDDWIAFLKVSPIIEKSLPKDTWNELWDFSVFVKSDPNCSNYDFEGAWPTLIDEFVSYYREHGYKNSSS

SEQ ID NO: 28522 - protein, 629 aa, Mycobacterium bovis AF2122/97
MKPYPFSAIVGHDRLRLALLLCAVRPEIGGALIRGEKGTAKSTAVRGLAALLSVATGSTETGLVELPLGATEDRVVGSLDLQRVMRDGEHAFSPGLLARAHGGVLYVDEVNLLHDHLVDILLDAAAMGRVHVERDGISHSHEARFVLIGTMNPEEGELRPQLLDRFGLTVDVQASRDIDVRVQVIRRRMAYEADPDAFVARYADADAELAHRIAAARATVDDVVLGDNELRRIAALCAAFDVDGMRADLVVARTAAAHAAWRGVRTVEEQDIQAAAELALPHRRRRDPFDDHGIDRDQLDEALALASVDPEPEPDPPGGGQSANEPASQPNSRSKSTEPGAPSSMGDDPPRPASPRLRSSPRPSAPPSKIFRTRALRVPGVGTGAPGRRSRARNASGSVVAAAEVSDPDAHGLHLFATLLAAGERAFGAGPLRPWPDDVRRAIRESREGNLVIFVVDASGSMAARDRMAAVSGATLSLLRDAYQRRDKVAVITFRQHEATLLLSPTSSAHIAGRRLARFSTGGKTPLAEGLLAARALIIREKVRDRARRPLVVVLTDGRATAGPDPLGRSRTAAAGLVAEGAAAVVVDCETSYVRLGLAAQLARQLGAPVVRLEQLHADYLVHAVRGVA

SEQ ID NO: 28523 - protein, 916 aa, Azoarcus sp. EbN1
MTEDKDAPLREDIRLLGRVLGDTVRDQHGEAAFALIERIRQTSVRFRRDDDNAARLELEGILDALSREQTIEVVRAFSYFSHLSNIAEDQHHIRRSRAHLIAGSAPREGSVAHALVRALASGLPPARLAAFFDTALISPVLTAHPTEVQRKSILNCETDIAHLLDARDRMTLTPEERQESDEALRRTVLTLWQTRMLRPAKLSVVDEVANGLSYFDATFLRELPHLYANLEDQLVSRDPALAGLELPAFLQVGSWIGGDRDGNPFVTADVLERTLAMQAGAVLGFYLDELHALGARLSLALGLVTASDALLALAARSPDHSPHRNDEPYRRAISGIYARLAATHHALLGTEPPRHPVAVAEPYAAVAELADDLDVIHRSLVANGSAALARGQLRRLRRAVRVFGFHLAPIDLRQNSEVHERVVAELLATARTGTDYATLDEAARVELLIEELATPRPLASPHVRYSDETEGELAIFRTARAAHRRYGGPAIPNCIISKTDDVSDLLELALLLKEAGLLRPHERALDVNIVPLFETIEDLANAPSVMDRLFALPGYMNLLAASRDRTHEVMLGYSDSNKDGGFLTSGWALYKAEIGLIEVFARHGIRLRLFHGRGGSVGRGGGPSYEAILAQPGGAVQGQIRLTEQGEVIAAKYGNPEVGRRNLEVIVAATLEASLLADRAPAPRVEFLDTMQALSDVAFAAYRGLVYDTEGFERYFWESTVISEIAELNIGSRPASRKKGTRIEDLRAIPWVFSWSQCRLMLPGWFGFGSAVKTWLAAHADDGIARLQAMHREWSFFAALLSNMDMVLAKTDLAIASRYAGLVKDVNLRDAIFERIRNEWHDTVDALLAITGQRELLDGNPLLKRSIRNRFPYLDPLNHVQVELLRRHRETHDDARIRLGIHISINGIAAGLRNSG

SEQ ID NO: 28524 - protein, 112 aa, Oceanobacter sp. RED65
MKLVTAVIKPFKLDDVREALSEIGVQGITVTEVKGFGRQKGHTELYRGAEYVVDFLPKVKLEIAIDDSLTEKVIEAVSKAANTGKIGDGKIFVTSLEQIVRIRTGETGADAV

SEQ ID NO: 28525 - protein, 149 aa, Zea mays
  misc_feature (51)..(51): Xaa can be any naturally occurring amino acid
  misc_feature (67)..(67): Xaa can be any naturally occurring amino acid
  misc_feature (76)..(76): Xaa can be any naturally occurring amino acid
LYATYEGTSAEDIAVARANARAIELGKLIGRHTVRSTLGALVYELRYKEIXNEFKRCKEVSKKKKRXTDEDIEALXSDEILHPIVLPTVVDVHATCQTLCLSTGSSTLTAPHGEERIACTIGTGPGAAAYNAIDQVIHILTDIPEYGMN

SEQ ID NO: 28526 - protein, 420 aa, Oceanobacter sp. RED65
MENQIFQLQYAMDTFYFLVCGALVMWMAAGFAMLESGLVRSKNTTEILTKNVALFAISCTMYLICGYEFMYDGGFFLSGVETVSTFDLEGALAASAEEGFDGGAVYSGASDFFFQVVFVATAMSIVSGAVAERMKLWAFLAFAVVMTGFIYPMEGSWTWNGDSVFGLFELSYSDYAGSGIVHMAGAAAALAGVLLLGPRKGKYGANGQVNAIPGANLPLATLGTFILWMGWFGFNGGSTLKLGGMEVANEVANVFLNTNAAAAGGLIGALILARILFKKADLTMALNGALAGLVAITAEPADPTPFQATIIGAIGGLIVVLSILALDKIKIDDPVGAISVHGVVGLFGVMVVPFTDADATFGGQLMGALTIFVWVFVTSLIVWGIIKAVMGVRVSEEEEYEGVDLAECGMEAYPEFTKNS

SEQ ID NO: 28527 - protein, 138 aa, Shorea ovalis
EKNIPVLLGLLSLWNVSFLGYPARAILPYSQALEKFAPHIQQVSMESNGKGVSIDGVPLPYEAGEIDFGEPGTNGQHSFYQLIHQGRVIPCDFIGSAKSQQPIHLKGEVVSNHDELMSNFFAQPDALAFGKTPEELHK

SEQ ID NO: 28528 - protein, 463 aa, Bradyrhizobium japonicum USDA 110
MPIQVLMPALSPTMEKGNLAKWLKKEGEAIKSGDVIAEIETDKATMEVEATDEGTLGKILIPEGTADVAVNTPIATILADGESAADLAKAPAPAPQPKAAESAAPAAAKAEAPAPRAAPSAPQAAAEPDPEVPAGTEMVTQTIREALRDAMAEEMRRDADVFVMGEEVAEYQGAYKVTQGLLQEFGAKRVIDTPITEHGFAGIGVGAAMTGLKPVVEFMTFNFAMQAIDQIINSAAKTLYMSGGQMGCSIVFRGPNGAAARVAAQHSQDYSSWYSNVPGLKVVAPFSAADYKGLLKAAIRDPNPVIFLENEVLYGHTGEVPKLDDFVIPIGKARIVRSGSHVTIISWSNGMTYALKAADELAKDGIEAEVIDLRTLRPMDTETIVNSVKKTGRAVTVEEGWAQSGVGAEIAARIMENAFDYLDAPVARVSGKDVPMPYAANLEKLALPSAAEVVEAAKAVCYR

SEQ ID NO: 28529 - protein, 419 aa, Candidatus Kuenenia stuttgartiensis
MPEKMEENSPWQTALTQFNNVSKRMNLPEDIHQILKHFSRILTVSVPVRMDNGSTASFEGFRVQHCSAKGPYKGGIRYHPDLTLDDLKALAMEMTWKCSLVDIPFGGAKGGVVCDPKKLSRGELERITRRYTYAIQPIIGPDIDIPAPDVNTNEQIMAWIMDTYSMNKGFCSPGIVTGKPLNIGGSLGRADATGLGVAYIAASAVRQNKKTLKGLNVVIQGYGNVGSAAGKFLEEMGCKIVAVSSSTGGIYNPGGLSHNAIIEHYRKTGGFRYFPLAENITNAELLELPCDVLIPAAMGGQITKKNAGKIKAKLIVEGANGPTTPEADEILSGRKIKIVPDILANAGGVIVSYFEWVQDAQCYFWCKNEVNAKLKILLERSFNDVYAFAQKNKYSLRTSAMMLAIKKVADVFTVRGLYP

SEQ ID NO: 28530 - protein, 138 aa, Shorea ovalis
EKNIPVLLGLLSIWNVSFLGYPARAILPYSQALEKFAPHIQQVSMESNGKGVSIDGVPLPYEAGEIDFGEPGTNGQHSFYQLIHQGRVIPCDFICSAKSQQPIHLKGEVVSNHDELMSNFFAQPDALAFGKTPEELHK

SEQ ID NO: 28531 - protein, 900 aa, Neisseria gonorrhoeae FA 1090
MQLHILNNPKDAALAADAEFLKQSLFNLLHEEASPLVVETVKLLSTSDDSAALIEKVLPQLDERQTYDLTLACGLFAQILNIAEDVHHERRRQIHEDAGHNAAEGSLTETVRRLKAGKADGKSVQRQLDNTSVTAVLTAHPTEVQRQTVLNFNRRIRALLPQRERCTNADALARLRREIDTVLLGLWQTSETRRHKLSVNDEINNGVSIFPMSFFEALPKLYRKMEHDFQTAYPDVRVPNILKIGGWIGGDRDGNPFVSGETLRFAFRRHADAVFRFYRSELDKLYRELPLSIRRVKVNDDVMALAALSPDEEIARTEEPYRRAIAYIMARAMGKARSLGLGMGCKFGFLEPYASAQKFLDDLKKLQRSLIDNGSRLLAEGRLADLIRSVSVFGFHMMPLDLRQHAGKHADVVAELFQHAGLEDYNSLNEEQKQAALLRELGHQRPLYSPFITYSDHTRRELAIFNEARKIKDEFGEDAVTQSIISNCEQPGDLLALALLLKESGLLAVENGKPHSRINIVPLFETIEALENACPVMETMFRLDWYDALLESRGNIQEIMLGYSDSNKDGGYVTSSWCLHQAELGLVELFKKYDVRMRLFHGRGGSVGRGGGPSYQAILAQPAGSVAGQIRITEQGEVITAKYADPGNAQRNLETLVAATLEASILPDKKDPDAKLMQALSDVSFKYYRELITHPDFIDYFLQTSPIQEIATLNLGSRPASRKTLARIQDLRAIPWVFSWMQNRLMLPAWYGFGSAVETLCEGSPETLAALRGHAQNNPFFQAMLSNMEQVMAKTDITLAENYAGLSESPEKAKVIFGMIKEEYRRSRKALLDLLQTEELLRDNRSLARSLALRIPYLNALNGLQVAMLKRLRKEPDNPHALLMVHLTINGVAQGLRNTG

SEQ ID NO: 28532 - protein, 262 aa, Aspergillus oryzae
MLVAKIVPGTKNNTCDGSPKKAYQEVALVTIGVHGHSLIDHSVPQELPRQLLLAFILLISCNPAYPEKAPLIKLVISYHPLFKIIMVETGLPAGWEVRHSNSKNLPYYFNPMTKESRWEPPSGTDTETLKFYMANYHSGPTSRPDGTGNGEGKIRCSHLLVKHKDSRRPSSWKESEITRSKEEAIEILRGHETRINSGEVSLGDLAMSESDCSSARKKGDLGFFGRGEMQKEFEDAAFALQPGQVSGIVDTASGVHLIERIQ

SEQ ID NO: 28533 - protein, 377 aa, Oryza sativa
MDKLSGSARLIIVSDLDHTMVDHHDEENLSLLRFGALWESVYCQDSLLVFSTGRSPTLYKELRKEKPMLTPDITIMSVGTEITYGEAMVPDDGWEEYLNNKWDRNPETEQRPHKVSFFVDKKSAQEVIKSLSGNMEKCGLDVKIIYSGGQDLDILPQGAGKGQALAYLLKKLSSCGKPPNNTLVCGDSGNDAELFSIPGVHGVMVSNAQEELLQWYAENAKGNPKIIHATERCAAGIIEAIGHFKLGPSVSPRDVGFPYVKEDHIKPTDAVVKFYVLYEKWRRAEVPKSDSVVQYFKNITHANGVIIQPSGLECSLHASVDALSSCYGEKQGKKYRTWVDRLFVSQSGSDSWLVRFDLWEAEVYPRTHQKLYEGFRQ

SEQ ID NO: 28534 - protein, 424 aa, Oryza sativa
MDDDAGDASPPPAAAGVGATAAQSRDMAASPTSSRSVTETVNGSHRFVIQGYSLAKGMGVGKHIASETFSVGGYQWAVYFYPDGKNPEDNSAYVSVFIALASEGTDVRALFELTLLDQSGKGKHKVHSHFDRSLESGPYTLKYRGSMWGYKRFFRRTALETSDFLKDDCLKINCTVGVVVSTIDYSRPHSILVPDSDIGYHFGTLLDNHEGVDVVLSVGGERFHAHKLVLAARSTVFRSKFFDDEDGEKNEPGENDDVQEIVIDDMEPKVFKAMLHFIYRDTLVDDNELGGSSSEGSIFDTLAAKLLAAADKYDLARLRLLCESYLCKAISVATVASTLALADRHHAMELKAVCLKFAAENLSAVIRTEGFDYLKDNCPSLQSEILRTLAGCEEECSSGGKSQSVWGQLSDGGDTSGRRVRPRT

SEQ ID NO: 28535 - protein, 123 aa, Synechocystis sp. PCC 6803
STLYEKLGGTTAVDLAVDKFYERVLQDDRIKHFFADVDMAKQRAHQKAFLTYAFGGTDKYDGRYMREAHKELVENHGLNGEHFDAVAEDLLATLKEMGVPEDLIAEVAAVAGAPAHKRDVLNQ

SEQ ID NO: 28536 - protein, 558 aa, Zea mays
MQGHSGDFWPISLIHSFAKLVTKILANRLGPYLQDLVAANQSAFIRGRSIHDNFMLVQQSIKFLHKKRISSLLRKLDISKAFDSVSWAFLLEILSHLGFGPVWHNLISNLLFTSSTQVLLNGSPGLVTNMLKSSAIPIRYLGLPISDKKLRKCDLKLWIEKIADRLPNWKARLLNLAGRTPLVKFVLSAIPTYLIAINVPQWVIKSIDKIRRGFLWRGRKEVNGGSCLVPWEVVTRPLKFGGLGIPNLKFKSWALQAKWLWLEKTDLSRPWHGLSLPVQRNGATTLFWSDRWIHGNTIHDIAPEVVGMVGRKAYSSRTVAQALDNWLWVSDIRGPLSLRELQQYLLLWDTLGEVRLSHDADKHVWMHSSSGMFSSKSCYKAFFMGSISFEPCKRLWKSWAPPKCKFFLWLAIRTKCWTADRLRRRGLQHPVVCVLCDQEQETVQHLLCICSFARQFWHAILVPFCLGDLIPAVDEISFADWRRKVIKKVPKIRKKGFNSLIILGSWCLWLTRNKGVFDGVNPSLCFVKSLFLNELSCWDRAGAKQLASFGLPAIMSRV

SEQ ID NO: 28537 - protein, 216 aa, Staphylococcus aureus
SDSDSDSGSDSDSGSDSDSESDSDSDSDSDSDSDSDSESDSDSESDSDSDSDSDSDSDSDSESDSDSDSDSDSDSDSDSESDSDSESDSESDSDSDSDSDSDSDSDSDSDSDSDSDSDSDSDSDSDSDSDSDSDSDSDSDSDSDSDSDSDSDSDSDSDSDSDSDSDSDSDSDSDSDSDSDSDSDSDSDSDSDSDSDSDSDSDSDSDSDSDSDSDSD

SEQ ID NO: 28538 - protein, 512 aa, Bradyrhizobium sp. BTAi1
MDKATPKADIYKANLDRAAPLLAKLKDEGIGHFIDGKVVPAISGATFETKSPIDNTVLAKVARGNAEDIDRAATSAALAFKSWREMAPAMRRKLLHRVADAIEDHADDIAVLECIDTGQAYRFMAKAAIRAAENFRFFADKCTEARDGLNTPSEEHWNISTRVPIGPVGVITPWNTPFMLSTWKIAPALAAGCTVVHKPAEWSPITAHWLAKLAKDAGIPDGVLNTVHGFGEEAGRALTEHPAIKAIGFVGESTTGSAIMAQGAPTLKRVHFELGGKNPVIVFDDADLDRALDAVVFMIYSLNGERCTSSSRLLVQQNIAETFTAKLAARVRALKVGHPLDPATEVGPLIHERHLAKVCSYVDIARQDGAIIAVGGKPVAGPGGGHYVEPTLVTGASQIMRVAQEEVFGPFLTVIPFGDEADAIAIANDVQYGLTGYVWTGDMGRALRVADALEAGMIWLNSENVRHLPTPFGGMKASGIGRDGGDYSFDFYMETKHVSLARGTHKIQRLGV

SEQ ID NO: 28539 - protein, 248 aa, Corynebacterium efficiens YS-314
MGDEDSTPGRRSKSYTRQGADVRPKKDGHGINLVGTLMAAADRGAAVVDGMVDFRPEDLRGSLRRGREANLIVFVVDTSGSMAARSRVRAVTGAIMSMLTDAYQRRDKVAVIAVNGNKPTLVLAPTSSVDMAQKSLDAMPMGGRTPLAEGLIMARDLMEREHRKEPSRRPLLVVMTDGEDTSDAGETGIATAARAVVKSGLSGNLVIDCEGRMKVRKERAAVLAQLLGGVCVRLSEMNGDNIKTVINA

SEQ ID NO: 28540 - protein, 296 aa, Haematococcus pluvialis
ITTMLSKLQSISVKARRVELARDITRPKVCLHAQRCSLVRLRVAAPQTEEAVGTQQAAGAGDEHSADVALQQLDRAIAERRARRKREQLSYQAAAIAASIGVSGIAIFATYLRFAMHMTVGGAVPWGEVAGPLLLVVGGQLGMEMYARYAHKAIWHESPLGWLLHKSHHTPRTGPFEANDLFAIIKGLPAMLLCTFGFWLPNVLGTACFGAGLGITLYGMAYMFVHDGLVSRRFPTGPIAGLPYMKRLTVAHQLHHSGKYGGAPWGMFLGPQELQHIPGAAEEVERLVLELDWSKR

SEQ ID NO: 28541 - protein, 489 aa, Halobacterium sp. NRC-1
MSDLDFGDVDWNVQYIDGEYVPPGDRGTLEVDDPSTRELFTEIPAGTTDDVDAAYEAAADAQTEWADTPPQERARIVAAASEILASHRDEVVDLLATESGTTYTKGAAEFEASVGITDEAASFPTRMNGDHKQSVVEGKENIVVREPQGVVGIISPWNFPLNLSIRAVAPAVAAGNSVVLKPASNTPVTGGLLIAKVFEAAGLPEGVFNVVTGKGSEIGDRIAGHPHADVISFTGSTAIGRQVAATAGENLALPAMELGGNNVHIVTEDADLDDAVDSGVFGSFLHSGQICISINRHVVHEDVYDEYVERLTERAAALPTGTAHDADTVVGPIIDESQRDQILDYIERTVDAGATLETGGDHDGLVVEPTVLSDATNDMAAACNEHFGPVAPVIPFSDDDEAVEIANSTEYGLSGSVHAGDTGRARDIADRIDTGMIHINDQPVNQEPHLPFGGYKNSGLGRYNGEYVLNEFTQEKWVSIQRETRDYPF

SEQ ID NO: 28542 - protein, 379 aa, Corynebacterium efficiens YS-314
MPVTRKASDYPMSTNQVLRYPFSAVVGQDELRLALILTAISPRIGGVVVRGEKGTAKTTTVRAFAGLLGDAPLINLPLGATEDRVVGSLNMETVLTTGRAEYKPGLLAQADGGVLYVDEVNLLADHLVDALLDAAASGRVSIERDGISHSSPANFVLVGTMNPEEGELRPQLLDRFGLAVDVVASNNPEIRVEIIQRRLAYEANPEQFVQDWAAQDEEISQRIHTARQLLPNVELPSKMLSQIAWLCSRIEVDGMRADLVITRTALAHAAWQGRTQITDEDVEVAARLALPHRRRRNPFDAPEMEERKLQEVLQEARNFYKDTTKQGPAAEETDEETGATALIDTENPTDEQGLEGTAQAKAQTTGKVGTAGHGEPFRS

SEQ ID NO: 28543 - protein, 434 aa, Euglena gracilis
MLPRRLLVPLFQAARTRGYAEKILMPALSPTMEAGTIATWKKKVGDKLRPGDVLCSVETDKATLDFEWAGDEGIVAQLALEPGHEPVPVGTPIAVLADDESDLPAAKAMDLSQGTSKAAKSSPAAPAAAAPPSEAPAVKAPSSSPKSEGVKPEPYTSAKVRASPAAMAVFAKHIQGTGPNGRIVEADVEAFLKDAGSGKVAGAAATPAPSAAGTLPAQYEDTPASLMRKSIASRLTASKVEIPHFYLTVDVAVEKMKEMVAALNAGAKDKEYKITVNDFLVKACALACKKVPAANSQWHGDKIRRFHSVDISVAVATPTGLITPVVYNADLKGLKEISNDIRTLAALAREGKLTPEQYIGGTFTISNLGSYGVKHFTAIINPPQACILAVGAAQENGLMSVTLSCDHRVVDGAVGATWLQAFKGYVETPSSLLL

SEQ ID NO: 28544 - protein, 108 aa, Legionella pneumophila subsp. pneumophila str. Philadelphia 1
MSDHIKTVTDASFEQDVINSSKPVLVDFWAEWCGPCRALTPILEEVAATHSKDMTFAKINIDENPQAPAKFGVMSIPTLILFKNGQVEAVKMGLLSKSQLSAFVESNL

SEQ ID NO: 28545 - protein, 360 aa, Aspergillus nidulans FGSC A4
MCIYKQPEDTAANNKRRRNRMGLPTFLYNQLLITPAIPTNPFTGQTAIITGSNTGLGLETARHIARLGADKVILAVRNTAAGENAAKDIEESTICKPGTCEVWPLDLASRHSVLAFAEKAKKELGRIDVLVLNAAVATKIFQLADGGYEHSITVNTINHFLLAIALLPKLQETGTNFTNRLAPPHLTVLTSQVHAWPEFPQSTDPRGIFVALSDKATAKMDERYPVTKLLNVYLTRELVEQLYSDSDGKDGEPSVVINMLDTGFCHSQLSRENQGVDALVFNLFKRLFARKEEVGARTTVTAASAGVESHGKYMVNGIVADEALSERIYNEEGRMIQKRLWKELTDIIKGFKPQIMEEFK

SEQ ID NO: 28546 - protein, 388 aa, Arabidopsis thaliana
MMMPHLSEDLVEEILSRVPAISLKRLRYTCKQWNALFNDQRFSKKHRDKAPKTYLGLTLKDFRIYSMSSNLHGLLHNNNIDLLMEFKGKLSSLNDLNDFEISQIYPCDGLILCSTKRNTRLVVWNPCTGQTRWIKRRNRRMCDTFAFGYDNSKSSCLNNYKILRVCEKIKGQQFEYEIFEFSSNSWRVLDVNPNCIIEGRSVSVKGNSYWFATITKTHYFIRRFDFSSETFQKLPLPFHIFDYNDSRALSAFREEQLSVLHQSFDTEKMDIWVTNKIDETTDWSWSKFFTVRLINRLDYPISMMMKSPLSFFIDEKKNIILCYDKHRENTYKSLVLIVGKDKVYREFYFPESYELGRTYLCNYVPSLVQIKQSGLISTRKRKRKDFSS

SEQ ID NO: 28547 - protein, 585 aa, Mesembryanthemum crystallinum
MGGSNALNEMTNGSDGITGGVADVYGEEFATQDQLVTPWSFSVACGHSLLRDPQHNKGLAFTEKERDAHFLRGLLPPVVLSQELQEKKFLTTLRQYQVPLQKYMAMMDLQERNEKLFYKLLVDHVEELLPLVYTPTVGEGCQKYGSIFRRPQGLFISLKDKGRILELLRNWPEKKIQVIVVTDGERILGLGDLGCQGMGIPVGKLSLYSALGGVCPSACLPITLDVGTNNQKLLDDEFYIGLKQKRATGEEYAEFVQEFMSAVKQNYGEKILVQFEDFANHNAFELLEKYRTTHLVFNDDIQGTASVVLAGLIASLKLLGGTLADHKFLFLGAGEAGTGIAELIALEMSKKTKAPVEQMRKKIWLVDSKGLVVSSRKETLQQFKLPWAHEHEPITTLIDAVQAIKPTVLIGTSGKGKQFTKEVVEAMANINAKPLILALSNPTSQSECTAEEAYTWSQGHAIFASGSPFDPVEYEGRTFVPGQANNAYIFPGFGLGLIMCGAIRVHDDMLLAASEALASQVTGEHFIKGLIYPPFKDIRKISAHIAAGVAAKAYELGLASRLPQPADLVKFAESCMYNPTYRSFR

SEQ ID NO: 28548 - protein, 309 aa, Bacillus cereus ATCC 10987
MRKIIVGSRKSKLALTQTNWFIDQLKALGLPYEFEVKEIVTKGDVILDVTLSKVGGKGLFVKEIEHALLTKEIDMAVHSMKDMPAVLPEGLMIGCTPKRVDPRDAFISKNGASFKELAEGAILGTSSLRRSAQLLAARPDLQVKWIRGNIDTRLRKLKEEDYDAIILATAGLQRMGWDNEVITEHLDETLCVPAVGQGALAIECREDDKDLLQLLAHMNDGVTEKTVAAERVFLHKLEGGCQVPIAGYATLTENDAIELTALVGSMDGSVLLKETVVGTDPEKVGLEAADRLIKQGAKELILAANKGQQ

SEQ ID NO: 28549 - protein, 173 aa, Pseudomonas syringae pv. syringae B728a
MSLHELNTLPGVTANPEAATRQFVFNHTMLRVKDITKSLDFYTRVLGFSLVEKRDFPEAEFSLYFLALVDKAQIPEDDAARNEWMKSIAGILELTHNHGTESDDTASYHNGNSDPRGFGHICVSVPDVKVACERFESLGVDFQKRLSDGRMNSLAFIKDPDGYWVEIIQPTPL

SEQ ID NO: 28550 - protein, 463 aa, Synechococcus sp. RS9917
MLLLRSIRGFKSNRSLMWLACVPVALFGLGLFNLSAHAAEMPELNAAFLANNLWLLVATILVIFMNAGFAMVEAGMCRQKNAVNILAKNLFVFALAVTAYWFIGYSLMYGDPVAAGWLYFSGLFFDPTVTPELIAEGGLVPSVDFLFQAAFAGTAATIVSGLVAERVKFGEFVIFALVLTAVIYPISGSWQWNGGWLSELGFIDFAGSSIVHSVGAWAGLVGAMLLGPRIGKFVDGKPQALPGHNMAIATLGALILWIGWYGFNPGSELAMDQYVAYVAVTTTLAAAGGAIGATVVSTMTSGKPDLTMIINGILAGLVSITAGCGNMTLVGSWVTGAIGGIIVVFAVAAIDAAQIDDPVGAFSVHGVCGIWGTLVIGLWGVDGMDTGAAGIGLFNGGGISQLGVQALGCAAYAIWTLITCWIAWSIIGGIFGGIRVTEKEEIEGLDIGEHGMEAYPDFASASN

SEQ ID NO: 28551 - protein, 520 aa, Pseudomonas syringae pv. syringae B728a
MLDANLKAQLKSYLERVTRPIEIVASLDDGAKSQEMLALLNDVISVSKDVTLNDSGTDARTPSFSLSSPGHDISLRFAGIPMGHEFTSLVLALLQVGGYPPKVSAETIEQVRALEGEFHFETYFSQSCQNCPDVVQALNLMAVLNPGIKHVAIDGALFQDEVTDRKIMSVPSIYLNGELFGQGRMGLEEILAKIDTGAGARQAEKLNAKQAFDVLVVGGGPAGSAAAVYAARKGIRTGVAAERFGGQVLDTMAIENFISVQHTEGPKLAVALEEHVKQYEVDIMNLQRADKLIPGAAGELHEVKFASGASLKAKTLILATGARWREMNVPGEQQYRNKGVAYCPHCDGPLFKGKRVAVIGGGNSGVEAAIDLAGIVSHVTLLEFDVQLRADAVLQRKLHSLPNVTVITSAQTTEVTGDEQKVNGLRYKNRTTGEEITVPLEGIFVQIGLLPNSEWLKGAIELSPRGEIVVDSRGETSVPGIFAAGDVTVAPYKQIIIALGEGAKASLSAFDHLIRTSAPA

SEQ ID NO: 28552 - protein, 876 aa, Photobacterium profundum
MNEKYSALRSNVSMLGHMLGNTIKDAHGEPLFDKVETIRKLSKSARAGNDSDRAKLIDELQNLPDDQLLPVARAFSQFLNLTNIAEQYHTISRHCEEQICSPDSIDSLFGKLNANSISQLDSIQAVRDLNIELVLTAHPTEIARRTMIHKLVQINKCLSNLELSELSHSERQRVEQRLEQLIAQAWHSDVIRKQRPTPLDEAKWGFAVVENSLWHAVPEFLRQFDEKLMRHLGEKLPLDASPVKFTSWMGGDRDGNPFVTSEVTREVMLLSRWKAADLFLGDIQELVSELSMVKCNDQVRELAGEEHEPYRAILKDLRTKLTNTRDVLAAKINKQDAPNLATIDDVDQLWTPLHACYQSLRECGMGIIADGLLLDVLRRIKCFGIHLVRLDIRQESTRHSDVISELTRYLGLGDYEQWNEQDKVAFLVRELASKRPLLPLAWQPSAEVQEVLDTCKAVAEQSREALGAYVISMARTASDVLAVHLLLKEAGCPFRLDVCPLFETLDDLNNGASVIKELMSIDWYRGFIQNHQMVMIGYSDSAKDAGVMAAGWAQYRAMEELVEVCEDASVELTLFHGRGGSIGRGGAPAHAALLSQPPRSLKGGLRVTEQGEMIRFKLGLPDVAVNSLSLYASATLEANLLPPPAPKKEWCDLMDVLSEVSCESYRNVVRGSEEFVPYFRAATPELELGKLPLGSRPAKRNPNGGVESLRAIPWIFAWSQNRLLLPAWLGAGEAIQYSIDKGHAQLLEDMCREWPFFSTRLGMLEMVYTKTNVGIAEYYDQRLTDKSLWPLGQKLRDQLQQDIKAVLNVENNAHLMEQNPWGAEAIRLRNIYVEPLNMLQAELLYRTRQQDEPSPILEEALMVSIAGIATGMRNTG

SEQ ID NO: 28553 - protein, 360 aa, Candidatus Kuenenia stuttgartiensis
MGVLTGGGDCPGLNAAIRAIVKSAVQKHNISVIGIEDGYDGLILPNKTRKLTPFNSRGILHVGGTILGTSNRANPFKYRITVNGKTEVRDVSSEVIQKTKLLELDALIVIGGDGSMNIASHLYDMGCPVVGVPKTIDNDVLFTDASFGFSTAVQIATEMLDRLHTTAESHHRVMVMEVMGRYAGWIAVASGIAGGADVILIPEIPYDREEVCQKILRRQKKGCRSSIVVVSEGAKEIGGALCILQSAEEGGSAERLGGAGEKAGLYIKKNTGIDVRVTTLGHVQRGGTPDAPDRILSTRFGAAAVNLIINNQFGRMVCLKGQDIESVPLSSVAGGQKKVPTETGLVITAEEIGVNFGRKA

SEQ ID NO: 28554 - protein, 920 aa, Streptococcus pyogenes serotype M6
MPLKKLESSNNQAIIAEEVALLKEMLENITRRMIGDDAFTVIESIMVLSEKQDYIELEKVVANISNQEMEVISRYFSILPLLINISEDVDLAYEINYQNNTDTDYLGKLALTIKDLAGKDNGKDILEQVNVVPVLTAHPTQVQRKTILELTTHIHKLLRKYRDAKAGVISLEKWRQELYRYIEMIMQTDIIREKKLQVKNEIKNVMQYYDGSLIQAVTKLTTEYKNLAQKHGLELDNPKPITMGMWIGGDRDGNPFVTAETLCLSATVQSEVILNYYIDKLAALYRTFSLSSTLVQPNSEVERLASLSQDQSIYRGNEPYRRAFHYIQSRLKQTQIQLTNQPAARMSSSVGLSTSAWSSPASLENPILAYDSPVDFKADLKAIEQSLLDNGNSALIEGDLREVMQAVDIFGFFLASIDMRQDSSVQEACVAELLKGANIVDDYSSLSETEKCDVLVQQLMEEPRTLSSAAVAKSDLLEKELAIYTTARELKDKLGEEVIKQHIISHTESVSDMFELAIMLKEVGLVDQQRARVQIVPLFETIEDLDNARDIMAAYLSHDIVKSWIATNRNYQEIMLGYSDSNKDGGYLASGWTLYKAQNELTAIGEEHGVKITFFHGRGGTVGRGGGPSYDAITSQPFGSIKDRIRLTEQGEIIENKYGNKDVAYYHLEMLISASINRMVTQMITDPNEIDSFREIMDSIVADSNIIYRKLVFDNPHFYDYFFEASPIKEVSSLNIGSRPAARKTITEITGLRAIPWVFSWSQNRIMFPGWYGVGSAFKRYIDRAQGNLERLQHMYQTWPFFHSLLSNVDMVLSKSNMNIAFQYAQLAESQDVRDVFYEILDEWQLTKNVILAIQDHDDLLEDNPSLKHSLKSRLPYFNVLNYIQIELIKRWRNNQLDENDEKLIHTTINGIATGLRNSG

SEQ ID NO: 28555 - protein, 937 aa, Schizosaccharomyces pombe
MALLLEGTSLARKVREELREQISSIKSVDPYFNVSLKIIQVGGREDSNVYVRMKTRAANEAGISCEHVNFPEDITEYDLLLAIKGFNEDPTVHGIIVQLPLPAHINEQIITEAVAPEKDVDGFCETNLGKLTKREGQPLFTACTPKGIMCILKHYGINVQGKHAVVIGRSNIVGRPMSILLEKANATVTLCHSKTESIADIVRTADIVVAAIGIPHFVKADWLKKGVVAIDVGINSIPDATKKSGYRLTGDIDFENAKEVASAITPVPGSVGPMTVAMLLQNVVESAVRFRKMSRKRKPTLLPLKLQTPVPSDIEIARSQTPKNIGDLASEIGIAKSELEFYGSHKAKVNLEILQRLAHRRDGHYVVVTGITPTPFGEGKSTLTAGLVQALSNLDKLAIACVRQPSQGPTFGIKGGAAGGGYSQFIPMEEFNLHLTGDIHAITAATNLLAAAIDTRMFHENTQSDAALYKRLTLVKGNKREFAPVMFRRLKKLGIDKTNPEELTEEEQRKFARLDIEPSTISWNRTLDVNDRFLRKITIGENPTEKGFTRQTGFDLSVASECMSVLALATDLKDMRERLGRMVVASNKSGEPVTADDLGVGGALTVLLKDAIKPTLMQTLEGTPALVHAGPFANISIGASSILADRIALKLAGTEVDEDAKKEAGYVVTEAGFASDIGMEKFFNIKCRTSGLKPDAIVIVATVQALKLHGGGPPVGPGKPIPEVYKREDVDLVRKGCANLAKHISNARKYGLPVVVAINKFSSDSPNEISAIREEALAAGATDAVDSNHWAEGGKGALGVARALINACENVDSEFRLLYDVHEPIEKKIEIIAKEMYGADGIELSPLAKERLETFTKQGYNNLPICIAKTQYSLSHDPDLKGAPTNFTVPIRDMRLSAGAGFIYPLAAAISTIPGLPTKPAYYNIDIAENGDIVGLS

SEQ ID NO: 28556 - protein, 216 aa, Staphylococcus aureus
SDSDSDSGSDSDSGSDSDSESDSDSDSDSDSDSDSDSESDSDSESDSDSDSDSDSDSDSDSESDSDSDSDSDSDSDSDSESDSDSESDSESDSDSDSDSDSDSDSDSDSDSDSDSDSDSDSDSDSDSESDSDSDSDSDSDSDSDSDSDSDSDSDSDSDSDSDSDSDSDSDSDSDSDSDSDSDSDSDSDSDSDSDSDSDSDSDSDSDSDSDSDSDSD

SEQ ID NO: 28557 - protein, 252 aa, Staphylococcus aureus
SDSDSDSGSDSDSGSDSDSESDSDSDSDSDSDSDSDSESDSDSESDSDSDSDSDSDSDSDSDSDSDSDSDSDSDSDSDSESDSDSESDSESDSDSDSDSDSDSDSDSDSDSDSDSDSDSDSDSDSDSDSDSDSDSDSDSDSDSDSDSDSDSDSDSDSDSDSDSDSDSDSDSDSDSDSDSDSDSDSDSDSDSDSDSDSDSDSDSDSDSDSDSDSDSDSDSDSDSDSDSDSDSDSDSDSDSDSDSDSDSDSDSD

SEQ ID NO: 28558 - protein, 828 aa, Xylella fastidiosa 9a5c
MSTVETPVYVPPTVVHKFGGTSVADADCYRHVARLLLAREETVQVTIVSAMKGVTDTLIALAEQAANHSPDWQALWQQTRTRHCDAAQALLGEHAGTLQNWLNTRFNELHEMLVALSVIRMLPSEVLDRLQGLGEVYSAQLLGQYLQAQGEDCVVLDARQVLVVSPGEFGAEVDWATSAQHLAHWRMQHPQRRVVVTGFVASDRTGRAITLGRNGSDYSGAIFAALFEADELHIWTDVDGVMSADPRVVPDAVQLDALSYDEACELAYFGAKVVHPQTMSPVMKRGVPIIIRNTFQPGHPGTRITADSVVSGSVKGLTLSPGLAVLNLEGTGLIGVPGTAERVFAALRNARLSVVMISQGSSEHSICCVVHQTEAERARDALLYAFAHELAIGHVQRVQLTNNISVLAAVGDGMAGHLGVAARLFESLRRAHVNILAIAQGSSERNISVAIDSQQATKALRAAHAAFWLSPQTFSIGVIGPGHVGEALLDQLCAAQQQLLSKANLDLRLRAIVSRRRMLLDERGLGSDWRHAFAAVPEAVDLDAFTAHLQAAHLPHAVIIDCSGSAEVADRYADWLAAGIHVVTPNKQAGSGPLHRYHAIRAAADASGARFRYEATVGAGLPVITTLRDLMDTGDSVTSIEGIFSGTLAWLFNKYDGSVPFSQLITQARAMGYTEPDPRDDLSGVDVARKLVILARDAGRDISLEDVAVESLVPETLCQLSVADFMARLNEVDATFAERLAAAKQRGCVLRYVAQLSPGHVPSVSLIELPSDHAFVNLRLTDNVVQFTTRRYSENPLVVQGPGAGPEVTAAGVFADLLRVAAGEGARL

SEQ ID NO: 28559 - protein, 99 aa, Glycine max
  misc_feature (28)..(28): Xaa can be any naturally occurring amino acid
  misc_feature (51)..(51): Xaa can be any naturally occurring amino acid
  misc_feature (66)..(66): Xaa can be any naturally occurring amino acid
GFKRRLARPRDCKGRFRDDPFLQEKQLXNVIQPIADRINIVKTFVKSLNPXCAVQGVAIAHPFEPXVHDESREAVIVSTVTLPGGVPITIRRAGRDLSQ

SEQ ID NO: 28560 - protein, 314 aa, Buchnera aphidicola str. APS (Acyrthosiphon pisum)
MYNKTLRIATRKSPLALKQTKYVQKKILSLYPDLNIKLVPIVTHGDNILNKSLSKIGGKGLFIKELELALLENKADIAIHSMKDLPVKITKELCLVSICKRGNALDSLVSNNYQSINQLPKGAIVGTSSLRRQCQLITYRPDLIISPLRGNIETRIAKLDQGKYDAIILATEGLNRLRLKNRITQIIPAELSLPSCGQGAIGIQSRLHDKKVLFFLSRLNHINTFIEINAERAFCRKLESGCQIPIGSYAILKKNKIWLRGLVGSPNGKIILKGERIGCYNTGEKMGYSLADELLKNGAKNILNNLHIKQSYCI

SEQ ID NO: 28561 - protein, 127 aa, Oryza sativa
MARKMIMVLLVEDEEINRVVARAALKAAGGGDVVDEAENGEVAVQRVRDAAAPYDLVLMDKQMPVMDGHEATRRIRGMGVTTPIVAVSSDGLPADVDAFITAGADDFTSKPLSKEKLGVILAKFRLA

SEQ ID NO: 28562 - protein, 418 aa, Escherichia coli
MRGSHHHHHHGSMKRAVITGLGIVSSIGNNQQEVLASLREGRSGITFSQELKDSGMRSHVWGNVKLDTTGLIDRKVVRFMSDASIYAFLSMEQAIADAGLSPEAYQNNPRVGLIAGSGGGSPRFQVFGADAMRGPRGLKAVGPYVVTKAMASGVSACLATPFKIHGVNYSISSACATSAHCIGNAVEQIQLGKQDIVFAGGGEELCWEMACEFDAMGALSTKYNDTPEKASRTYDAHRDGFVIAGGGGMVVVEELEHALARGAHIYAEIVGYGATSDGADMVAPSGEGAVRCMKMAMHGVDTPIDYLNSEGTSTPVGDVKELAAIREVFGDKSPAISATKAMTGHSLGAAGVQEAIYSLLMLEHGFIAPSINIEELDEQAAGLNIVTETTDRELTTVMSNSFGFGGTNATLVMRKLKD

SEQ ID NO: 28563 - protein, 672 aa, Blastopirellula marina DSM 3645
MPSPDFISDNLRVLILPPTPRDAAITERILNQNHIETFACRNIEHFCEEAKAGAGVLLIAEEHLLGDPHRLAAQMLSEQPAWSDLPFLILTLASGRNAQILEQWQQAAYVTLITRPLQIQPFISVVRSRLQDRKRQYMVRDLLNRLEHHGRQFSQLADAMPQIVFTTTRQGEIEYLNQRALDYFGVSRQEIAGFDWTSTIFESDFANAKIRWERALEKGSSFQCEFRMQHARTLEHRWHLARSLPVLDESGKVIRWFGTVTDIHKQKLIEEKLNLALQQAAAANVVKTEFLANMSHEIRTPMTAILGYAELLAQQETDLEKLHFLKVIRQNGEFLVEIINDILDLSKIEAGKLDITLEPLELSRMIEEIQSLMLVRAAENDIEFNVDFAATVPERIRSDSKRLRQILINLIGNAVKFTQEGSVRLVVSPDAERIQFDVIDTGIGMTQQQVEQLFLPFQQADSSVSRKFGGSGLGLAISQRLAVMLGGEITVQSQQGQGSVFTLSIPNNLAGHTSVEPARSLPSANAATILREKPLLQCEILLVEDRQAIRFLAGRILTNAGASVQFAENGLEATQLVQRLHETNSAPDIVLMDMQMPVMDGFHATARLREMGFNRPIIALTADAMQGDMDRCIASGCNAYVSKPIDTAELLQVIARYVTPTEDNAARDAERR

SEQ ID NO: 28564 - protein, 108 aa, Buchnera aphidicola str. APS (Acyrthosiphon pisum)
MNKIIELTDQNFEEQVLNSKSFFLVDFWAQWCNPCKILAPILEEISKEYSNKVIVGKLNIEENPNTAPVYSIRSIPTLLLFNNSEVLATKVGAVSKLELKEFLDENIN

SEQ ID NO: 28565 - protein, 420 aa, uncultured archaeon GZfos36D8
MNAQVRKIKIYQKDIIYNYQSIDTMNEEKYDVVVVGAGPAGSITAKTAAERGLDVLLIERNPEIGVPVKCGECVSKEIERFVDIDRRWVCAGIRGTITYGPDGTKVILSVEGAEEVGYVLERKIFDKCLAQEAARAGAEVRVKTQVYGVVNDGGYAKGVYARTAEAEGDIRISADVVVGADGVESRVGKWGGIDTTLHLADVATCAQFLMCDIEVNNEYCEIFFGDDVAPKGYGWIFPKGDHCANVGLGIGGDVSNENHCARDYLNAFVGGKFPNGKIIAEMYGAVPLSGPVYETVANGLILVGDAARHVNPITGGGILEAMQGGEIAGDVIAKAVQENDFSKRRLREYEKRWRKEFGKVLKAGLKTKNIVLGLSSQDLNRFFHALEGEMITKEFSERALLKEIIKRNPRILFKLVRMIF

SEQ ID NO: 28566 - protein, 418 aa, Escherichia coli
MRGSHHHHHHGSMKRAVITGLGIVSSIGNNQQEVLASLREGRSGITFSQELKDSGMRSHVWGNVKLDTTGLIDRKVVRFMSDASIYAFLSMEQAIADAGLSPEAYQNNPRVGLIAGSGGGSPRFQVFGADAMRGPRGLKAVGPYVVTKAMASGVSACLATPFKIHGVNYSISSACATSAHCIGNAVEQIQLGKQDIVFAGGGEELCWEMACEFDAMGALSTKYNDTPEKASRTYDAHRDGFVIAGGGGMVVVEELEHALARGAHIYAEIVGYGATSDGADMVAPSGEGAVRCMKMAMHGVDTPIDYLNSQGTSTPVGDVKELAAIREVFGDKSPAISATKAMTGHSLGAAGVQEAIYSLLMLEHGFIAPSINIEELDEQAAGLNIVTETTDRELTTVMSNSFGFGGTNATLVMRKLKD

SEQ ID NO: 28567 - protein, 928 aa, Bradyrhizobium sp. BTAi1
MSPQTMPSEDIRPSRAADAQAMEEDARLRDDIRLLGRILGDTVRDQEGADVFDLVERIRQTSVRFHRDEDRQARRELEQILDGMTIAETVRIVRAFSYFSHLANIAEDQNNIRRMRARSDANGGAGMLAATLAHAKSAGFEAADLRKFFSTALVSPVLTAHPTEVRRKSTMDREMEVAMLLDRRERMQLTPDEREANDEALRRAVLTLWQTNLLRRTKLTVLDEVTNGLSFYDYTFLREVPRLLCTLEDRLNDGAEVAGDLASFLRMGSWIGGDRDGNPFVTAEVMRGTLKLQSSLALHYYLEELHLLGGELSIAAHLADVSEELRALAERSPDTSPHRSGEPYRLAVSGIYARLAATAKKLGIQISRLPVGVGAPYDSVKQFQDDLDVLHRSLIANNAEVIARGRLRLLRRAVDCFGFHLARLDIRQNSTVHERTVAELIDTAMPGMSYMALSEDARVGLLVSELRNTRPLVSQFVKYSDETVGELELFRAAAEAHATFGADVISQCIISMCKGMSDMLEVALLLKEVGLIDPSGRCAVNIVPLFETIEDLQASSGIMDRMLALHDYRRLVDSRGAVQEVMLGYSDSNKDGGFVTSGWELYKAEIGLVEIFERHGIRLRLFHGRGGSVGRGGGPSYDAIIAQPGGAVNGQIRITEQGEIISSKYSNAEVGRNNLEILAAATLEASLLHPRQPAPKREYLTAMDRLSELAFKAYRGLVYETDGFVDYFWASTVINEIATLNIGSRPASRKKTRAIEDLRAIPWVFSWAQCRLMLPGWYGFGSAVETWIAENPEQGMPFLRELYQEWPFFRMLLSNMDMVLAKSSIAIASRYAELVPDEALREKIFGRIRREWHLAIETLLDIMGQERLLQGNPLLERSVRNRFPYLDPLNHVQVELLKEHRAQNPDEQVLRGIQLTINGISAGLRNTG

SEQ ID NO: 28568 - protein, 262 aa, Frankia sp. EAN1pec
MAVEDDLQFERDGNVARIWLNRPHKKNCITVPMLERLDTLVTEIDADPELRVVVLRGRGNTFSSGFDLDSLQADFIGSSTAMEVAVISAKICDRLYNMSTPSVAVLEGYVTAGGFELMISCDFAIAEENALIGDFHIRRALFGGAGPIYRLPRMIGIRKTKELMLTGKLLNGAQAADFDLVNASAPAAELDATVAEFVGHLTDKSPFQMRLTKMAVDRGLDADIASLMVLEHLAVGVTLNSEDAAEGVAAFLEKREPKWTGR

SEQ ID NO: 28569 - protein, 497 aa, Candidatus Pelagibacter ubique HTCC1002
MNLLEHFVGGKLISGSSDRKSKVFNPATGEQESEVRLASKTDLDKAVGVAQKAFETWSLKPSLQRARVMFKFKELIEKNADELTKLIVSEHGKVYEDAKGSLTRGLEVVEFACGIPHLLKGEFSENVGTNVDSWSMRQPLGVVAGITPFNFPAMVPMWMFPIAIACGNTFILKPSEKDPSCPLRLAELLTEAGLPDGVFNVVNGDKEAVDAILTNKDVKAVSFVGSTPIAKYIYENSAKNEKRVQALGGAKNHLVVMPDCDLDGAVNGLMGAAYGSAGERCMAQSVAVAVGDIGDELVARLSKKAEALKVGPGMDKTSEMGPLVTKEHLEKVKSYVDLGVEEGAKLVVDGRNIKLQGYENGFFIGGCLFDHVKKDMRIYKEEIFGPVLSVIRVKTFEEATKLINDHEYGNGVSIYTRDGDAGRTFASKIQVGMVGINVPIPVPMAFHSFGGWKRSLFGDSAMHGAEGIKFYTKLKTVTSRWPSGIRSNAEFVMPTMK

SEQ ID NO: 28570 - protein, 413 aa, Medicago truncatula
MAGLAPEGSQFDTKQFDTKMNELLSTEGQEFFTSYDEVHETFDAMGLLENLLRGIYAYGFEKPSAIQQRGIVPFIKGLDVIQQAQSGTGKTATFCSGILQQLDYGLVQCQALVLAPTRELAQQIEKVMRALGDYLGVKVHACVGGTSVREDQRILQTGVHVVVGTPGRVFDMLRRQSLRSDCIKMFVLDEADEMLSRGFKDQIYDIFQLLPPKIQVGVFSATMPPEALEITRKFMNKPVRILVKRDELTLEGIKQFYVNVDKEEWKLETLCDLYETLAITQSVIFVNTRRKVDWLTDKMRGRDHTVSATHGDMDQNTRDIIMREFRSGSSRVLITTDLLARGIDVQQVSLVINYDLPTQPENYLHRIGRSGRFGRKGVAINFVTLEDARMLADIQKFYNVIVEELPSNVADLL

SEQ ID NO: 28571 - protein, 112 aa, Mannheimia succiniciproducens MBEL55E
MKKIEAIIKPFKLDDVRESLSDIGITGMTVTEVRGFGRQKGHTELYRGAEYMVDFLPKVKLEIIIPDELLDQCIEAIMETAQTGKIGDGKIFVYNVERVIRIRTGEENEDAL

SEQ ID NO: 28572 - protein, 275 aa, Oryza sativa
  misc_feature (83)..(83): Xaa can be any naturally occurring amino acid
MSAVVCGKRSSAIFADDLLPPSPPSPHSHHHPAKRSCRSPHRRRVAHLPHLFCLLPGMYPQLLEGALDASGDDLDSAIKSLYXLCLVSIEALLLATACNSYIVLPTLVYPSVEGIVNNGGVSTANEHPAAADSCQTGNNGSEWVELFVREMTNASDMGDARARASRALEVLEKSIVERTGADAAQNLQKENMMLKEQLTVVLRENAVLKRAVAIQHERQKEFDERSQEVQSLKQLVVQYQEQLRTLEINNYALTMHLKQAQQNNSIPGHFNPDVF

SEQ ID NO: 28573 - protein, 397 aa, Xylella fastidiosa Ann-1
MSASFSPHTITLIKSTVPLLAEHGTTIIEAMYHQLFEDPQIEALFNQANQKNGTQIHALAGAILAYARNIDNPGVLASAIERISQKHVGYAIHPEHYPHVATALLGAIKQVLGDVATSEVLQAWGEAYWFIANLLKDREAVIREGIMTKNGGWIHWRRFVISKRIPESETITSFMLHPDDGGPVVPHQAGQYLTFRFDAAGMPGMKRNYSISCGPNSDHYRITVKREHGTGASAFLHDQAKVGTIIECTPPVGDFFLPSVIERPIVLLSGGVGLTPMVSMMEQIAEAYPDAQVWYVHGTQNRETHAMDAHIRALVSRHKHMKATTFYTQRSEADDAEAGFITIDWLRANTPFQKADFYLCGPRPFLRTFVRDLIGAGVPAAQVHYEFFGPMDEEMAA

SEQ ID NO: 28574 - protein, 126 aa, Glycine max
  misc_feature (49)..(49): Xaa can be any naturally occurring amino acid
  misc_feature (67)..(67): Xaa can be any naturally occurring amino acid
  misc_feature (91)..(91): Xaa can be any naturally occurring amino acid
RAASFSSPRTFTTLTLFKSKTKADPAKTKVTKPKQKVEDGIFGTYGRIXFTKHNELFVARVAMLGLXSSLLREGTTAKGMLAHLNLDTGVXLYEAEPVLMDFILCTLLGGIGGVRYRGKFVDDEPT

SEQ ID NO: 28575 - protein, 577 aa, Neurospora crassa
MLNRFRPARLVAQSSRCLPLTRARAGPLPVNNARTLATRAAAVNTKEPTERDNITTLSNGVRVASEDLPDAFSGVGVYIDAGSRYENDYVRGASHIMDRLAFKSTSARTADEMLETVEKLGGNIQCASSRESMMYQAATFNKAIPTAVELMAETIRDPKLTDEELEGQIMTAQYEVNEIWSKAELILPELVHMAAFKDNTLGNPLLCPKERLDYINRDVIQTYRDAFYRPERLVVAFAGVPHERAVKLAEKYFGDMKASDAPGLSRTGSETSVDSLVSESSEASSESSSSSSDSSESSGGLLSKLFSPKAKKATPNPFLTRVPISTEDLTRPAHYTGGFLTLPSQPPPLNPNLPTFTHIQLAFEGLAISDDDIYALATLQTLLGGGGSFSAGGPGKGMYSRLYTNVLNQHGWVESCVAFNHSYTDSGLFGIAASCYPGRTLPMLQVMCRELHALTTDHGYSALGELEVSRAKNQLRSSLLMNLESRMVELEDLGRQVQVHGRKIPVREMTRRINELTVKDLRRVAKRVVGGMANNAGQGSGAPTVVLQEATVQGLKTTELGWDQIQDTIAQWKLGRR

SEQ ID NO: 28576 - protein, 459 aa, Silicibacter pomeroyi DSS-3
MATEILMPALSPTMEEGTLAKWLVKEGDTVSSGDILAEIETDKATMEFEAVDEGIVGKILIAEGTEGVKVNTPIAVLLEDGESADDIASASSGAAAPSSAPVAAPAEKAPQGAAEAPAAPPVDLSPDWPADAPMKSQTVREALRDAMAEEMRADEAVYLMGEEVAEYQGAYKISQGMLDEFGSKRVIDTPITEHGFAGIAVGSAFGGLKPIVEFMTFNFAMQAIDQIINSAAKTLYMSGGQMGCPIVFRGPNGAAARVGAQHSQDYAAWYMQIPGLKVAMPYSAADYKGLMKTAIRDPNPVIFLENEILYGRSFDVPQIDDLAIPFGKARIWREGTDVTIVSFGIGMQYALEAAERLATDGISAEVIDLRTLRPMDLPTVINSVMKTNRLVTVEEGWPQGSVGSYIASEVMQQAFDYLDAPIITCTGKDVPMPYAANLEKLALVTTDEVVAAVKQVTYR

SEQ ID NO: 28577 - protein, 291 aa, Candidatus Pelagibacter ubique HTCC1002
MSVLINKNTKVICQGFTGTHGTFHSEQALKYGTNLVGGVTPKKGGQKHLDRPVFNTVAEAKQEVGADATMIYVPAKFAAAAIIEAIDASIELIVCITEGVPIQDMLRVKQKLNNSKSRLIGPNCPGIITPDECKIGIMPGNIHKKGSVGIVSRSGTLTYEAVAQTTENGLGQSTCIGIGGDPINGTNFIDCLDLFLNDAETESILMIGEIGGSAEEEAAEFVKNHKIKKPMVGFVAGITAPPGRTMGHAGAIISGGKGGAEDKIKKMEECGITIAKSPSELGKTLFNKLSN

SEQ ID NO: 28578 - protein, 232 aa, Munzothamnus blairii
GGRYSVCSAVGVLPLSLQYGFPVVEKFLKGARSIDQHFLSAPFEKNIPVLLGLLSVWNVSFLGYPARAILPYTQALEKLAPHIQQVSMESNGKGVSIDGVRLPFEAGEIDFGEPGTNGQHSFYQLIHQGRVIPCDFIGIVKSQQPVYLKDEVVNNHDELMSNFFAQPDALAYGKTPEQLQSENVASHLVPHKTFTGNRPSLSLLLPSLDAYRIGQLLSMYEHRIAVEGFIWG

SEQ ID NO: 28579 - protein, 437 aa, Silicibacter pomeroyi DSS-3
MPTEILMPALSPTMEEGTLAKWLVKEGDSVSSGDLLAEIETDKATMEFEAVDEGIVGKILVPEGTEGVKVNTPIAVLLDEGESAGDIASASSGATAPSSAPAAASAEKAPQGAAEAPAAAPAAPKAADGARVFASPLARRIAADKGLDLSQIAGSGPHGRIVKADVIGATAPAAAPASAAPAPAAAAAPAAAPSGPGADMVARMYEGREYEEVKLDGMRKTIAARLSEAKQTIPHFYLRRDIKLDALMKFRAQLNKQLEGRGVKLSVNDFIIKAVANALQQVPDCNAVWAGDRVLKLKPSDVAVAVAIEGGLFTPVLKDADMKSLSALSTEMKDLATRARDRKLAPHEYQGGSFAISNLGMFGIDNFDAIVNPPHAGILAVGSGVKKPVVGADGELTVATVMSVTMSVDHRVIDGALGAQLLQAIVDNLENPMVMLA

SEQ ID NO: 28580 - protein, 361 aa, Neisseria meningitidis
MEFVYDVAESAVSPAVIKVIGLGGGGCNASNNMVANNVRGVEFISANTDAQSLAKNHAAKRIQLGTNLTRGLGAGANPDIGRAAAQEDREAIEEAIRGANMLFITTGMGGGTGTGSAPVVAEIAKSLGILTVAVVTRPFAYEGKRVHVAQAGLEQLKEHVDSLIIIPNDKLMTALGEDVTMREAFRAADNVLRDAVAGISEVVTCPSEIINLDFADVKTVMSNRGIAMMGSGYAQGIDRARMATDQAISSPLLDDVTLDGARGVLVNITTAPGCLKMSELSEVMKIVNQSAHPDLECKFGAAEDETMSEDAIRITIIATGLKEKGAVDFVPAREVEAVAPSKQEQSHNVEGRSAPIAVSAR

SEQ ID NO: 28581 - protein, 501 aa, Xanthomonas campestris pv. campestris str. ATCC 33913
MSESVPRVSLLIDGALVVSATTHWQDVVNPADQSVLAQVPFATPAEVDAAVAAAQQAFVGWRKTPIGTRARIFLKYQQLIREHMPELAAILSAEQGKTLADAEGDVFRGLEVVEHAAAIGNLQLGELANNVANGVDTYTLLQPLGVCAGITPFNFPAMIPLWMFPMAIATGNTFVLKPSEQDPMVTMRLVELALEAGIPKGVLNVVHGGEEVVNALCDHPDIKALSFVGSTKVGTHVYRRASLAGKRVQCMMGAKNHAVVLPDANQEQTLNAMVGAAFGAAGQRCMAASTLVLVGEARQWIPALVAKARGLKLGAGSTPGTDVGPLISCAARERVEGLIASGVAQGATLELDGRTPQVPGLEHGNFVGPTIFSGVTPGMRIYDEEIFGPVLVILEAATLEEAIALVNANPNGNGTALFTQSGAAARRFQEDIDVGQVGINVPIPVPVPLFSFTGSRASKLGDLGPYGKQVVMFYTQTKTITARWFDDETLGHGVNTTISLK

SEQ ID NO: 28582 - protein, 248 aa, Borrelia garinii PBi
MYKLVLVRHGESEWNKENLFTGWTDVKLSDKGINEALEAGLLLKQEGYSFDIAFSSLLSRANDTLNIILRELGQSYISVKKTWRLNERHYGALQGLNKSETAAKYGEGKVLIWRRSYDVPPMSLDESEDRHPIKDPRYKYIPKRELPSTECLKDTVTRVIPYWTDEIAKEVLGGKKVIVAAHGNSLRALVKYLDNLSEEDVLKLNIPTGIPLVYELDKDLNPIKHYYLGDESKIKSAMESVASQGKLK

SEQ ID NO: 28583 - protein, 425 aa, Candidatus Pelagibacter ubique HTCC1002
MSEKILVPVLGESITEATVAKWLKKEGDTVVADEAIVELETDKVNLEVPSPIDGVLSEINSKDGETVEVGALLGMISQNGAQPSEKKIITKIEPKKTENNVVNLEIKKEAPKVLKEPEEEEPLVLTNEVKEEKTNSSNNNNEILSPAVRKIVVENKIDLKKVSGSGKEGRVLKGDLISMMGENPQPSERKIKYGQEERIKMSRLRQTIAKRLKQAQENAALLTTFNEVDMTGIMEMRKENQEDFQSRYGIKLGFMSFFVKACVAALKMYPSVNAEIDGDEIIYKNYYNMSFAVGTEKGLVVPVLRDTDQLSFADIEKNIKTISEKARDGKITIEDLQGGTFTISNGGVYGSMLSTPILNLPQSGVLGMHNIVERPMVVDGEIKIRPIMYLALSYDHRIIDGKESVSFLKMVKENLEDPRRLFLNI

SEQ ID NO: 28584 - protein, 263 aa, Shewanella oneidensis MR-1
MSQLKSGIYYGTVTHSRFMPIKHHFSYEMALLAIDLDEVDSISRMGRIFASQRRALLRFNPADYLTTFTSKDNLSRKLDVEEPSASALKSRVLQQVAELGGEKRCNRVLFVGQIRHFGVYFSPVNFYFCYQNQIPLYMLAEVSNTPWDQRHCYLVDLSVSNTTDKVFHVSPFMDLDMRYKWHVEPPSERLNIGIENLPNHSGKRLFNATLSMSRQEINAASLRTLLFRFPFMTLKIFGGIYWQALKLFYKRVPFVPHPAQMEK

SEQ ID NO: 28585 - protein, 598 aa, Oryza sativa (japonica cultivar-group)
MGVLGSRVAWAWLVQLLLLQQLAGASHVVYDDLELQAAATTADGVPPSIVDSELRTGYHFQPPKNWINDPNAPMYYKGWYHLFYQYNPKGAVWGNIVWAHSVSRDLINWVALKPAIEPSIRADKYGCWSGSATMMADGTPVIMYTGVNRPDVNYQVQNVALPRNGSDPLLREWVKPGHNPVIVPEGGINATQFRDPTTAWRGADGHWRLLVGSLAGQSRGVAYVYRSRDFRRWTRAAQPLHSAPTGMWECPDFYPVTADGRREGVDTSSAVVDAAASARVKYVLKNSLDLRRYDYYTVGTYDRKAERYVPDDPAGDEHHIRYDYGNFYASKTFYDPAKRRRILWGWANESDTAADDVAKGWAGIQAIPRKVWLDPSGKQLLQWPIEEVERLRGKWPVILKDRVVKPGEHVEVTGLQTAQADVEVSFEVGSLEAAERLDPAMAYDAQRLCSARGADARGGVGPFGLWVLASAGLEEKTAVFFRVFRPAARGGGAGKPVVLMCTDPTKSSRNPNMYQPTFAGFVDTDITNGKISLRSLIDRSVVESFGAGGKACILSRVYPSLAIGKNARLYVFNNGKAEIKVSQLTAWEMKKPVMMNGA

SEQ ID NO: 28586 - protein, 232 aa, Rafinesquia californica
GGRYSVCSAVGVLPLSLQYGFPVVEKFLKGARSIDQNFLSAPFEKNIPVLLGLLSVWNVSFLEYPARAILPYTQALEKLAPHIQQVSMESNGKGVSIDGVRLPFEAGEIDFGEPGTNGQHSFYQLIHQGRVIPCDFIGIVKSQQPVYLKDEVVNNHDELMSNFFAQPDALAYGKTPEQLQSENVASHLVPHKTFTGNRPSLSLLLPSLDAYRIGQLLAIYEHRIAVEGFIWG

SEQ ID NO: 28587 - protein, 494 aa, Staphylococcus aureus subsp. aureus Mu50
MTEWTREERYQRIEDVDTEYFKTLKQQVDQSKFRQQFHIQPETGLLNDPNGLIFYKGKYYVSHQWFPLGAVHGLKYWYNYTSDDLINFKPEGPILNPDTKYDSHGVYSGSAFEYNGHLYYMYTGNHRDNHWQRHASQMIARLKEDGSVEKFPKPVISQQPEGYTSHFRDPKVFKYGEKYYAIIGAQNNDQQGRLLLYNTEDIINWHYLGEINTELDDFGYMWECPDYFNLDNQDVILICPQGIEPKGNQFKNIYQSGYILGKFDIEKLTYEHENFVELDNGFDFYAPQTFLDEKGRRVLIGWMGLPEIEYPTDNEGWAHCLTIPRVLNVENGQLKQRPYPALEKLRHNKETALGYANKFTRKLHPYEGKQYELIIDILDNDATEVYFELRTSKTSSTLIAYNKRENKITLDRSDSGLLPTNVEGTTRSTILDTPLKQLQIFVDTSSIEIFCNDGERVLTSRIFPTEDALGIKTSTESGQVYLQFTKYDLKDEHK

SEQ ID NO: 28588 - protein, 586 aa, Oryza sativa (japonica cultivar-group)
MATARARAALVFVALLQMAAVVVVRASHVVYPELQSLEAKHVDGKLRTGYHFQPPKHWINDPNGPMYYKGLYHLFYQYNPKGAVWGNIEWAHSVSTDLIDWTALEPGIYPSKTFDEKGCWSGSATVLPSGVPVIMYTGIDPDERQVQNVAYPVNLSDPYLREWYKPDYNPIINPDGGINASAFRDPTTAWYGPDGHWRLLVGSKVNMKGLAVLYRSRDFKKWVKAHHPLHSAHTGMWECPDFFPVAVAGGSRHYRRGVDTAELHDAAVAEEVKYVLKVSLDLTRYEYYTVGWYDHATDRYVPDAAFPDNDYGLRYDYGDFYASKSFYDPAKRRRIVWGWANESDTVPDDRRKGWAGIQAIPRKLWLSADGKQLVQWPVEELKALRAKHVNVTDKVIKKGNYFEVTGFKSVQSDVDMAFAIKDLSKAEEFDPAWRTDAEALCKKLGSDVDGGVGPFGLWALASGDLKERTAVFFRVFKANDSSHVVLMCNDPTRSSYESKIYRPTFAGFVDVDIAKNKQIALRTLIDHSVVESFGARGKTCILTRVYPRKAVGDDAHLFVFNNGESDVKVTNLDAWEMKTPKMNAEE

SEQ ID NO: 28589 - protein, 429 aa, Kineococcus radiotolerans SRS30216
MVRAVPAIVRAPHLFLAEVTRRHGPVAAIPLPRTPVLVLADPDGVRRVLVENARGYGKATIQYSALATVTGPGLLAGDGEVWKQHRRTVQPAFHHGSLEDVAAHAVHAARGLVAEADALPPGTPLEVLGATSRAGLEVVGHTLAAADLSGDAPLLVEAVGRALELVVRRAASPVPAAWPTPARRRLAREVAVIDEVCARIVATRRARPLEDPRDVVGLMLAAGMDDRQVRDELVTFVVAGHETVASSLTWTLDLLARAPSVLARVHAELAGALGGREPGWDDLGKLPLLRAVVDESLRLYPPAWVVTRQALADDVVAGVAVPAGTLVIVCTWGLHRDPALWEAPEEFRPDRFLDAPRPAAGSYVPFGAGPRLCIGRDLALVEEVLVLATLLCERTVRPAGPAPRVDALVTLRPRGGLPLHVERLAPSAS

SEQ ID NO: 28590 - protein, 512 aa, Shewanella oneidensis MR-1
MSVNQNRSGKHALMWFRQDLRLTDNQAFTAACDWVRQHHAAKLKAIYIATPSQWHQHDIAPIQLDFIQRHVNLLAQGLVSLGVEFELIQLDSFRDIPAFLTSYCEEHSIGRVFAGQEPEINEQKRDQACVEAGIPLSLSDEHCLLPPGTVLNLSGDMYRVFTPFSRKWREVAAKQAILPLGVPAPLGSILSEPKPLFFKNIGSTYLAASKDIASSKKGFNQTAPNPLISSEQWAAGEGQAKRLLNQFIQQKVQDYKQDRDFPAIDGTSVISPYLAIGVLSPRQCVAALLQRFPEVIVDDTSPGRTWLNELIWREFYRHLLVAFPDLSKGNNFNRQADHVLWRNNQSEFLAWCEGKTGYPIVDAAMRQLNQTGWMHNRLRMVVASFLTKHLLIDWRWGERYFRQHLIDGDLAANNGGWQWSAGCGCDAQPYFRIFNPMSQSEKFDPDGRFIRKYLPELASWGVTRLHQPNQQKMPSLFEAPLFASQADYPNAIVEHNAARARALTVLGVLKKA

SEQ ID NO: 28591 - protein, 634 aa, Parvularcula bermudensis HTCC2503
MCGIAGIVDLVGEREIPESPLDRMVKALAHRGPDGGGVYRVPGLAFGHRRLAIVDPDQAAQPYIGSEGSVLTYNGEIYNHGELRGDLDRARRPIKTRSDTEILCELMELRGEDALPSLDGMFAFAHWTPRTETLLLVRDRIGEKPLYLAQTPDNFLIFASEIDAILESGLISAEINPTAVADYLLYGYVPDPKTIYRGIGKLPPGHLLKIARGQPIAPAKPWWTLTFKPDDGCLYEAVVEELPLLLDRCVSAQMMSDVPIGAFLSGGLDSGAVTASMQKAATAPVTTCAMGFADPDFDERAAARETATHLCTNHFDWEAPLSPVEDVPRLAAIYGEPFADSSALPTAHLCAGARRHATVALSGDGGDEVFAGYDRYGGILNEARLRQAIPGVVRRSIVTKAGNAFPAFTDRVPKPLRLRTVLQSVGEDHAAAYARAVSAVLPDLSRTLLSEELRDYRPEHHVEEAVYKADTDDPILSAQAADFATWLPGRMLVKIDRASMAVGLEVRPPLLDHRLVEWAARLPRRIKYSEGKGKVILREAIGDRLPKGVSTRAKKGFGSPVDHWFRDQDGSLSRHLLDRTAWRECGFFDQSAVEDLVARHCAGRRNAGQALWSILMFDAFLIRKPSDRTSIASY

SEQ ID NO: 28592 - protein, 202 aa, Triticum aestivum
MVDLQAAALVISVVAAEVQAIYLHSTAMAPTVMASSTTSVAPFQGLKSTAGLPVSRRSNGASLGSVSNGGRIRCMQVWPIEGIKKFETLSYLPPLSTEALLKQVDYLIRSKWVPCLEFSKVGFIFREHNASPGYYDGRYWTMWKLPMFGCTDATQVINEVEEVKKEYPDAYVRIIGFDNMRQVQCVSFIAFKPPGCEESGKA

SEQ ID NO: 28593 - protein, 443 aa, Parvularcula bermudensis HTCC2503
MVNARLSRILATASVASVAIAPAVAQDGAPAPDTVFIFNTLLFLIMGMVVMFMSAGFCMLEAGSVRSKNVAAICLKNISLYAIAGLMVWLCGYNLIYGGEAGGYIGSLAVWSADDSAPLDVGYSASSDWFFQMVFVATAASIVSGTLAERIRVWPFFIFTAVLTGFIYPIQASWQWGGGWLSELGFSDFAGSTLVHATGGWAALAGALALGARTGRFTSDGSPVAFYGSSMPLATLGTFILWLGWFGFNGGSQLAMGSISDAVAVSDIFVHTNMAAAAGVVTVLILSTLLLGKINLPMVLNGAIGGLVSITAEPLIPAPLLGTPILTAVIVGSVGGVIVFLTMPLLESLKIDDVVGAIPAHLFCGIWGTLIVPFSNTDISIGAQATGVAANAIFVFGTSLVLWFLLRFTIGIRSSEAEEEIGLDLAETGAPGYDFVPVNVPAE

SEQ ID NO: 28594 - protein, 422 aa, Arabidopsis thaliana
MRRTRCSWCFMSRESSTSGHKQVCTTRNGWTAFVKRVSMASGAIRRFQERVLGPNRTGLPSTTSDVWLLGVCYKISADENSGETDTGTVLAALQLDFSSKILMTYRKGFEPFRDTTYTSDVNWGCMIRSSQMLFAQALLFHRLGRAWTKKSELPEQEYLETLEPFGDSEPSAFSIHNLIIAGASYGLAAGSWVGPYAICRAWESLACKKRKQTDSKNQTLPMAVHIVSGSEDGERGGAPILCIEDATKSCLEFSKGQSEWTPIILLVPLVLGLDSVNPRYIPSLVATFTFPQSVGILGGKPGASTYIVGVQEDKGFYLDPHEVQQVVTVNKETPDVDTSSYHCNVLRYVPLESLDPSLALGFYCRDKDDFDDFCLRALKLAEESNGAPLFTVTQTHTAINQSNYGFADDDSEDEREDDWQML

SEQ ID NO: 28595 - protein, 115 aa, Triticum aestivum
MARGAATQLVLVSMVAATLLVACDAAISCGQVTSALSPCISYARGNGADPPAACCSGVRSLAGAARSTADKQAACKCIKSAAGGLNAGKAAGIPLKCGVSVPYAISSSVDCSKIR

SEQ ID NO: 28596 - protein, 318 aa, Striga hermonthica
MATFPVINMAKLNGEGRPATMAQIEDACQNWGFFEVVNHGISAEFMDRVERLTKEHYKKCMEQRFKEMVAAKGLEAVQSEINDLDWESTFFLRHLPSSNISEIPDLHPEYREVMKEFAAHLEKLAEHLLDLLCENLGLEMGYLKKVFYGSKGPTFGTKVSNYPPCPKPDLIKGLRAHTDAGGIILLFQDDKVSGLQLLKDGQWVDVPPMRHSIVVNIGDQLEVITNGKYKSVMHRVIAQTDGTGRMSLASFYNPGSDAVIYPAPALVEKAENNELYPKFVFEDYMKLYAGLKFQAKEPRFEAFKNMDKAANLGPIATA

SEQ ID NO: 28597 - protein, 726 aa, Aspergillus oryzae
MATPSAVRLLAIRPVIVGFAKLLMLALGGLPLVSAAPATYIAYSEESPKAPNDPDLWLYLGVAAILVLSGGAFAGLTIALMGQDEVYLQVIKTSGEGSERKNAESVLKLLKRGKHWVLVTLLLSNVITNETLPIVLDRSLGGGWPAVLGSTVLIVIFGEVVPQSICVRYGLPIGAWMAPCVLALMYIMAPVAWPIAKLLDRLLGEDHGTIYKKAGLKTLVTLHKTLGEAGEQLNSDEVTIISAVLDLKDKPVGSIMTPMDDVFTMSADTVLDEDTMDLILSQGYSRIPIHAPDNPTNFVGMLLVKMLITYDPEDCRRVREFALATLPETRPETSCLDIVNFFQEGKSHMVLVSEYPGEDRGALGVVTLEDVIEELIGEEIVDESDVFIDVHKAIRRMTPAPIKSRVPKGKIVEEPPSLPPQKTGTLVDVDGEPQVSKPPANVRRRSSVEPPLPRFQLRMPQSDRNSDSTDGLVTKRGTTDEIREHLKHLGPSNLASRPRQTRYQNVKIKRASVSPTRSAQTDMDSGHSMSGSQALHPNSTALPGGIGEGLVQPGLDARDGAYAVRVGYGTMSGPKPADAGTQTVGKDVSIPEAVHEEQDEPPRPPGSAAISVNSESSNSQKFKPTSYQHQGPARSGSITEHVVDVNGIRKVVLHTTSTSSSDHEGRTSPKSKFPVRQDGEVVDLNGKRSDGTQGDGTKKRRRRRKRGQASKHADNHVDEESPLLPQ

SEQ ID NO: 28598 - protein, 1059 aa, Pseudomonas fluorescens Pf-5
MIAGGAAGALGNYYRVQVEDVYRASIQMQTREQAQDLEQWKSNGFAIGALSILGRHNPSLKRIVLEPEPSADLMERATIPLKTLSLVVEANHAFVLNREGVVVAAHDQHGQTPLGLNVAFRPYFKVALDGGSSVYGAISATTGTRMFYMAAPIFESRTRQDKVIGVLVARFDADRLDASLSKPYSDDLKMILSPSGVVLAASSPAFILKSDRAWPWNRFTGEIRRQFSDYRFANGVPERLPFDAHQSVIQLDGRRYSLSRVDFDWNDPSGPWTLITLGDLDTLLPGEQVLLIEGLSALVFLLLLWGGLRRLADARRHKRDVAQIEQSEQRLDMALQSGALGLWDWNLSLGTVINNDVWLQILGYSKQQMEQAFGHGLERWTALVHPDDYEPVMARLKAHLNDEVGEYRAEYRMRNKEGQWLWVLDIGKIMQRDASGAPARVTGVLQDISERKAVEAQIQQSRQDAERATQAKSEFLDCMSHEIRTPLNAIIGMAHLALDLPLEPVQRDYIEKIDRAAKHLVGTINGVLDLSKIEAGKLSMEQVGFDLRELVDDVLLLVRQRAEEKALRLQLDIPASLPHRYVGDPLRLAQVLTNLVDNAIKFTEAGHVCIGVYLVRQWDHQALLCFSVTDTGVGISDEQQARLFNVFVQADRSISRRYGGSGLGLTISKKIVQLMQGDIRVKSQPGQGATFKFSVQLSLPPLPLEENCATPAAPATGATAGQGAINDPVRWLAGTRVLVVEDNRLNQEVLQGLLQRVGGQVVLAANGAQALRLLLEEGRFDAVLMDCQMPVMDGFATTRKIRGYPHLRWLPIIAVTASSQADVQGRAVAAGMSDLLSKPLEVAAFYRTLVRWIKATDMPVAQVPAPPGTRVLNSTYAGIDTACGLAVVNQDLALHRKLLADFRDSQQQVIERLWQAHAAGDLATLGFLAHSLQGNAGNIGATAVKEAAGQLEEQAGGPAALGPLIEQLARCLEPVLAGLASLPGAADGDLAPQQLGLDPEQVLALERLAKLLSSHNAQALALIDELYEQYPCGPLRAIQERIYRLEFQQAHDLLVDFQG

SEQ ID NO: 28599 - protein, 355 aa, Vitis labrusca x Vitis vinifera
MVTSVAPRVESLSSSGIQSIPKEYIRPQEELTSIGNVFEEEKKDEGPQVPTIDLKDIESEDEVVRERCREELKKAAMEWGVMHLVNHGISDDLINRVKVAGETFFNLPMEEKEKYANDQASGKIAGYGSKLANNASGQLEWEDYFFHLIFPEDKRDMTIWPKTPSDYVPATCEYSVKLRSLATKILSVLSLGLGLEEGRLEKEVGGMEELLLQKKINYYPKCPQPELALGVEAHTDVSALTFILHNMVPGLQLFYEGKWVTAKCVPNSIIMHIGDTIEILSNGKYKSILHRGLVNKEKVRISWAVFCEPPKEKIILKPLPETVSETEPPLFPPRTFSQHIQHKLFRKTQEALLSK

SEQ ID NO: 28600 - protein, 204 aa, Oryza sativa
MTSVWKTKVLTGLNKLFDKDGKKAAAAEFLKSFNKEEIGKEIDDKKTELEPKVVEVVESSPPEIKALLKDKKTASKIKKNGPAVTKFLEELAKIDFPGAKPVSDAVAKSGTTPLSPAIAFILEKVAPFVPKEEPKPEPEAEAAAETTSREVAVEEEKKEEEAAPAEPAAAAAEAAAPSTEVVEEKKEEEKPAEAAAPAAEPEKQ

SEQ ID NO: 28601 - protein, 373 aa, Candida albicans SC5314
MRFGDEHQTLKYKQSPNSKNQTFSMAELKQVTFSPEVLARIAPDVSLQRHLALGVRPNLRNFTEFKPVEVSNSTQFQDNNDNVFSSSVVKSGSTTIINTITLGIVENFNSNESEYATIYPCVEILRGRLGAPTDEEMILSQDLFETLYHNKIIPSTSLKINNLGISIKDDQTTTSQTNSTIYYPDLNPEQWEYINLTSHHHKSYSFVLLSNIKVYSKSTSTCSLFDLCYLSMLEALKSLKLPRCYVSESFTTKVAMKSRRSNTRGLVDTNKASINIDLNKSLYEKIDLNIKSGTIASNFGVISHEGNTILLADLEGEAEESSVLSRLSIITNNDSINKISLVNGDPESEITLEMLKNAIEISKQRSREQGQQI

SEQ ID NO: 28602 - protein, 384 aa, Corynebacterium glutamicum
MTSVIKKKAKFNTLSVSGVKKLTDDSVEVSFDVPEELQDDYDYIPGQYVALRATVDGEELRRSYSICDIPNKGTIRVGIKKDLGGKFSTWANEELQLGDVIDVMNPQGAFTSKIHVTSLNDAQNLVDSELGQVENPNFVAIAAGSGITPIMSIAQAVLKSLPKATFQLVYSNKGGADVMFADKIGDLKDKYPARFAVHHVLTREQRVNPLFSGRIDDEKMELLLDQVLRPDLVDEWFLCGPFELVQMCRDSLKERDIDEKRIRFELFSTGDPKSAPGGNAGRPVIADPKGKNISIQFQLDGLSGTIESPVSAKETVLNAALRARPDVPFACAGGVCGTCRAKVVEGDYEMDENYALEPDEVAAGYVLTCQTRPTGDCITVDYDA

SEQ ID NO: 28603 - protein, 249 aa, Corynebacterium glutamicum
MSFDFDALTITESDDLLIIELSRPEVRNAIDQTMVNELHEVCAYLEENPKTAIIIGSDGIFASGADIGQLRERRREDALRGINNSIFHRIAQLPMPVIAAVDGFALGGGLELALAADFRVATQNAKFGQPEASLGIMAAAGGTWRLKAAVGEPLAKDILLAGRIIDGEEAKTYQLVSNLAPAEDLLDEAKKLAQRIGKLDPLAVRITKSVMALPESAHPQADNLAQAILFESEAKFDRMQAFLDRKKSK

SEQ ID NO: 28604 - protein, 1101 aa, Oryza sativa
  misc_feature (50)..(50): Xaa can be any naturally occurring amino acid
ESSPPRRLGKRAESQSLHRWSARYCLLLPAPRSTIAAAFSPDGRTLASTXKQIASIAFHAKGELLAVASGHKLFIWDYNKRDEASDPPMILRTRRSLRAVQFHPNGAPYLLTAEVNNLDSADSELTHATSSGYSNSPSAVFFAIMNSACCPYSESRFSSPCLIWPAYVRDDGSICLLRNDWVSGSSDVQQPSDSETQQAGHMVTPMDVCPGEPGVNNYDDEDSASLSNRIEMHTPSWQNSSRFHNSSAATDLHRIDIRQVSDLSSDTPNPEMPAHSRIDVPNSMPMDLFAFSNTIDVQMFLRDVEAGHHHNNYTGGSHSWELPFLQGWLMAQNRTGLRATLPNNEVIGDLPIGGTAGTDNVMNESSNMYSFERVGPSSSIPITTDSLRGLSKHRHMLASVPGGAGTSLQGAQNGEAHVNVVSLVKLRIWRHNIDNPCAVLAPEACCLTISHAVLCSEMGTHFSPCGRFLVACVACLLPQTEVGVTINTFEFSPTSEHILLAYGRRHNSLLRGIFMDGKTTIPVYTVLEVYRVSDMELVRVIPSAEDEVNVACFHPSPGAGLVYGTKGGGSMECVRSGSGVLDPRCSPRFLGKKGGSLTSCGKATSTNLAICTKHEQNLHGNVKPSQLAASGSSYSVHRSPVLKQRQNLSARSTSADVYTTFDENVRAVSSHAAEEKVGVLLLNLGGPETLDDVQPFLFNLFADPDIIRLPRLFRFLQRPLAKLISTFRAPKSKEGYASIGGGSPLRKITDEQANALKVALKKKNLNANIYVGMRYWYPFTEEAIDQIKKDKITKLVVLPLYPQYSISTSGSSIRVLQNIVKEDSYFAGLPISIIESWYQRDGYVKSMADLIEKELSIFSNPEESVIGTCHFRMIHVNVMIFFSAHGVPLTYVTDAGDPYRDQMEDCIALIMGELKSRGILNSHTLAYQSRVGPVQWLKPYTDEVLVELGQQGVKSLLAVPVRFISLTIQEWLVQFAFFFPTSPCDYLLVLTNLSSISFVSEHIETLEEIDMEYKELALESGIENWGRVPALGCTSSFISDLADAVVEALPSASALVTKKVDESDSDMDLMHYLSKMFFGSILAFVLLLSPRLISAFRNTLL

SEQ ID NO: 28605 - protein, 487 aa, Triticum aestivum
  misc_feature (220)..(220): Xaa can be any naturally occurring amino acid
  misc_feature (240)..(240): Xaa can be any naturally occurring amino acid
MGTPKWVVAPLALLLLLQLAGASHEVRRSLEAEAASPSVPASILSPLLRTGYHFQPPMNWINDPNGPLYYKGWYHLFYQYNPKGAVWGNIIWAHSVSRDLINWIALDPAIKPSIPTDQFGVWSGSATILPNGTVAMLYTGIDRPGTNYQIQNIAFPKDPSDPLLREWVKPGYNPIALPEPGMNATQFRDPTTAWHAGDGLWRMLVGGLKPGTLRGMAILXRSRDFKHWVRAKHPLHSALXTGMWECPDFFPVREPGKTNGLDTSEFGPHYKYVLKNSLDLTRYDYYTVGTYNNRTERYVPDNPTGDVYQRLQYDYGNFYASKTFYDPAKNRRVLLGWANESDSVAHDNAKGWAGIHAIPRKIWLDPSGKQLLQWPVEELDQLRGKAVSVGDKLVKPGQHFEVTGLQSYQSDVEVSFEVSSLDKAEPFDPAYANDAQKLCGMKNADVKGGVGPFGLWVLASDNLAEKTAVFFRVFKVFKHNKVGTGGG

SEQ ID NO: 28606 - protein, 398 aa, Candidatus Carsonella ruddii
MAKKKFNREKIHLNVGTIGHVDHGKTTLTAALTKVSSDLYGSECRPFDSIDNAPEERERGITISTSHVEYESETKHYAHVDCPGHADYIKNMITGAAQMDGAILVCSAVDGPMPQTREHILLARQVGVPTIIVYLNKADCVKDKELLELVEMEIRELLTEYDFDGNNTKIIIGSALLALENKDDNQLGTSSIIKLLEILDKNIPVPNSIIDKPFLMPIEDVFSISGRGTVVTGKIERGIIKTGEEIEIVGFKETIKTIVIGIEMFKKTLDEGFAGENVGILLRSIKREEVERGQVLIKSGTIKPHTNFICEVYILSKEEGGRHTPFFKGYKPQFYFRTTDITGICDLPKNIEMVMPGDNVKLIVKLLSSIAIEKGLRFAIREGGKTVGAGIITEVLND

SEQ ID NO: 28607 - protein, 259 aa, Bradyrhizobium sp. BTAi1
MELKYSKITRKGPVTIVTLARPEVYNALHIEAHYELERVFDTFAADPEQWVAIVTGEGDKAFCAGNDLKWQAAGGARGWGKSGFGGLTSRFDCDKPLIAAVNGVAMGGGFEIALACDLIIAAENATFALPEPRVGLAALAGGLQRLPRQIGMKRAMSMILTGRHVGAREGHELGFVNEVVPQGEALAAAERWAETIAKNSPMSIRASKQAIEKGLAVSLQQAITEQRDYPAVQAMIHSQDYIEGPKAFSEKRPPNWLGR

SEQ ID NO: 28608 - protein, 265 aa, Xanthomonas campestris pv. campestris str. ATCC 33913
MSDWEGRAHTGLQLERDGHVAIVTLSNPPANTWTVHSLAALRDLVLTLDADRSIYALVITGAGDKFFSAGADLKQFAEGDKALAREAARRFGEAFEALSAFRGVSVAAINGYAMGGGLECALACDLRIAEQQAHLALPEASVGLLPCAGGTQNLARLVGEGWAKRMILLGERIDAATAQRIGLVEEVVGPGEARAHAIAWAQRAGKQSPQSVAACKRLVQATRHGTHAAALVAEREAFVDLFEHPDQREGVAAFLEKRAPQWSDH

SEQ ID NO: 28609 - protein, 450 aa, Triticum aestivum
MSTCAASLAPLLGTAAANATDYLCNQFADTTTAIDSTYLLFSAYLVFAMQLGFAMLCAGSVRAKNTMNIMLTNVLDAAAGALFYYLFGFAFAFGTPSNGFIGKHFFGLRDVPQVGFDYSFFLFQWAFAIAAAGITSGSIAERTQFVAYLIYSAFLTGFVYPVVSHWIWSADGWASASRTSGPLLFNSGVIDFAGSGVVHMVGGVAGLWGALIEGPRIGRFDHAGRAVALRGHSASLVVLGTFLLWFGWYGFNPGSFLTILKSYGPPGSIHGQWSAVGRAAVTTTLAGSTAALTTLFGKRLQTGHWNVLDVCNGLLGGFAAVTAGCSVVDPWAAIICGFVSAWVLIGLNKLAARFKFDDPLEAAQLHGGCGAWGVIFTALFARREYVEQIYGAPGRPYGLFMGGGGRLLGAHVVLILVIAAWVSCTMGPLFLALNKLGLLRISAEDQMAGM

SEQ ID NO: 28610 - protein, 258 aa, Triticum aestivum
MSATCAADLAPLLGAAAMNATDYLCNRFADTTSAVDSTYLLFSAYLVFAMQLGFAMLCAGSVRAKNTMNIMLTNVLDAAAGALFYYLFGFAFAFGTPSNGFIGKHFFGLKDMPQTGFDYSFFLFQWAFAIAAAGITSGSIAERTQFVAYLIYSAFLTGFVYPVVSHWIWSVDGWASAARTSGPLLFKSGVIDFAGSGVVHMVGGIAGFWGALIEGPRIGRFDHAGRSVALKGHSASLVVLGTSCSGSAGTVQPGSFVT

SEQ ID NO: 28611 - protein, 257 aa, Pseudomonas putida
MPRYLDVQAPENGVQLITLQRPEALNALCTELLAELATALDAAARDDQIGVVVLTGSRKAFAAGADIREMAERDLVGILNDPRVAHWQRIAAFAKPLIAAVNGYALGGGCELVMCADIVIAGSDARFGQPEINLGIIPGAGGTQRLLRAVGKPLAMQMVLTGEAITARHAQQAGLVSEITQPEFTVERAMQIARNIAAKAPLAVRLAKEALLKAGDTDLASGLRFERHAFTLLAGTADRDEGIQAFQEKRPARFQGR

SEQ ID NO: 28612 - protein, 517 aa, Oryza sativa (japonica cultivar-group)
MCPVNGKLQLHDGRTAYHFQPAKFWQNDPNGPLYHNGLYHFFYQYNPHGPLWDTGKLSWGHSVSGDLVNWAFLGTAIDPTDPFDVNGCWSGSATVLLGGRPAFLYTGRDAGGVQVQNVSFAKNPLDPLLREWEKPSCNPIIAFPADVINNNFRDPTTAWLGRDGLWRMVVAAEVAGAGSALVYRSADFLRWERNAAPMHSSAAVPVLECPDFFPVAEHGIDGLDTSANGGGTGVKHVLKLSEFDTHQDFYMVGRNRRVQWLWVNEYDSKADDVAKGWAGVQAFPRKVWLDGDGKQLLQWPVDEIETLRTKRVGLQGTEVKAGGLHEIVGVASSQADVEVVFEIPNLEDEAESFDPDWLDPHKLCKDKGAASAHGGVGPFGLIVMASGDLQEQTAVFFRVFKHHGKYKVFMCTDLTRSSTKADVYKDAYGGFVDVDIQKDKSISLRTLIDHSMIESFGGGGRACITTRVYPEHAATSSSHLYVFNNGSGTVNVSKLEAWEMATATVNSADALDAITRS

SEQ ID NO: 28613 - protein, 541 aa, Exiguobacterium sibiricum 255-15
MNAAERFVQCLEAEGVTHIFGVPGEENITLLEAISKSDITFITTRHETNAAFMASMFGRLSGRPGVCLSTLGPGATNMMTGIASATMDHSPVVAITGQGATWRQHKASHQMFDLVEMYRPITKSSTSIVSGEVISEVVRQAFAKAVSEKPGSTHLSFPEDIAKADVDAKMSFLQDSPPTFLHPTSVADSDVLLRIEQAERPVVIAGFGINRSGATEAFRAFAERLGAPVVETMMGKGALSSLHELAAHTIGLPNADYNQRILDQSDLIIAVGYDITELPPSKWNPERTPVLHIDTNPHEIDQFYPVVANLIGSIPDILHLLSESIPNRAWTGWQQDRDRLRQEIQATYSLALPLHPQSIVRELEQATGEDGMIFSDVGAHKIWLGRHFQTTRPNQLFISNGFSSMGYGLSSAIAAKLLHPEQRVLCASGDGAFLMNGQDLETAVRLKLPIVVIIWRDGTYGLIEWKQQQAYGRAPYIEFDNPDLVQLATAFGALGLRVGEHGTLSSCLEQAFLSDGPVLIDCPVDYRENLKLSDRLRTYGG

SEQ ID NO: 28614 - protein, 479 aa, Exiguobacterium sibiricum 255-15
MNGKFLINGQWLDQGRERTDVKNPATGEVVGSVPNGTKSDVNDAVEAAHNAFPDWSKRTVYERAALLEKLYAKMLEKKDELARLMTLEMGKPLAESEGEVEYAANFVKWFAEEGKRAYGRIIPSHDATKRLHVIKQPVGVVAAITPWNFPAAMITRKLAPALVAGCTFVLKPPTATPLTALRLLELCQEVGIPDGVVNAVTGSGKDLGESLATHPHVAKITFTGSTEVGRTLMAQGAETIKAMSLELGGHAPILVFDDCDLDLAVRETIKSKFRNGGQTCVCGNRIYVSDSIYDEFVEKLGQETAKLKTGNGLDQETKIGPMINKAGYDKVKKHVDDATSAGARIVTGGSGQTDDDNDVYYYEATVLADVTPQMLIMNEETFGPVAPVQRVSSDEEAVHYANQTPFGLASYVFTNNYARAFKAIEHLDYGIVGWNDGVPSAAQAPFGGMKQSGVGREGGSEGLEAYLETKYVSIGGLDQ

SEQ ID NO: 28615 - protein, 596 aa, Oryza sativa (japonica cultivar-group)
MALAGLPLSVFAIAVHFCLVFSSSSSPPVCPANGHRDRTAYHFQPAKNWQNDPNGPVYYNGMYHLFYQYNPHGALWDVGNLSWGHSVSGDLVNWAALDNALDPTAPFDANGCASGSVTILPDGVPVVMYSGIDARRRQVQNVAFPKNPRDPLLREWTKPGYNPVIPVPADVSPDNFRDPTTAWLGSDGLWRFAISAVADGVGATLVYRSADFLRWERNAAPLHASRDAVMAECPDLFPVAEHGEDGLDLDASAIGGAGAGVRHVLKVSMPDTLEDYYMVGRYDDADDTFTVPPEDLEAHGDDYRRWRRIDHGHLYASKTFYDAGKKRRVLWAWVNESDSEADDVTKGWSGLQSFPRAVWLDEGGRQLVQWPVEEIETLRRKRGVLLGGNEVEAGGLREIGGIAGSQADVEVAFEIASLAGADRLEPDHLRDPDALCGENGAAVHGGIGPFGLLVMASGDLRERTAVFFRVFRLSHGYTVLMCTDLTRSTSRAGVYKPSHGGFVDIDIEKDRAISLRTLIDHSIVESFGGGGRTCMTARVYPEHVATGSSHLYVFNNASDAVKVSKLEAWELATASVNAGDDGLISYGGPVCAAQVQ

SEQ ID NO: 28616 - protein, 232 aa, Stephanomeria guadalupensis
GGRYSVCSAVGVLPLSLQYGFPVVEKFLKGARSIDLQFLSAPFEKNIPVLLGLLSVWNVSFLEYPARAILPYTQALEKLAPHIQQVSMESNGKGVSIDGVRLPFEAGEIDFGEPGTNGQHSFYQLIHQGRVIPCDFIGIVKSQQPVYLKDEVVNNHDELMSNFFAQPDALAYGKTPEQLQSENVASHLVPHKTFTGNRPSLSLLLPSLDAYRIGQLLAIYEHRIAVEGFIWG

SEQ ID NO: 28617 - protein, 131 aa, Schizosaccharomyces pombe
MSGGKSGGKAAVAKSAQSRSAKAGLAFPVGRVHRLLRKGNYAQRVGAGAPVYLAAVLEYLAAEILELAGNAARDNKKTRIIPRHLQLAIRNDEELNKLLGHVTIAQGGVVPNINAHLLPKQSGKGKPSQEL

SEQ ID NO: 28618 - protein, 596 aa, Oryza sativa (japonica cultivar-group)
MARLGLAVCAASFHLFLLLASTSSLRRAPTEADTANHARRTAYHFQPAKNWQNDPNGPMYHNGMYHLFYQYNPHSALWDIGNLSWGHSVSGDLLNWAALDTALDPTSPFDANGCWSGSATILPGALPAILYTGIDASKEQVQNVAFAKNPSDPLLREWEKPAYNPVIALPADVPGDKFRDPSTAWLGRDGLWRIAVSAEVDGVASTLVYRSKDFVRWERNAAPLHASRAAGMVECPDLFPVAERGEDGLDTSANGAGGVRHVLKLSVMDTLQDYYMVGTYDDAADAFSPAEPERGDDCRSWRRLDYGHVYASKSFFDVRKNRRVLWAWANESDSQADDVARGWSGVQTFPRKMWLAKDGKQLLQWPIEEIKTLRRKRAGLWQGTRLGAGAVQEIVGVASSQADVEVVFKIPSLEEAERVDDPNRLLDPQKLCGEKGAAVRGGVGPFGLLVMASGDLHEHTAVFFRVFRHHDKYKLLMCTDLTKSSTRAGVYKPAYGGFVDMDIDDHKTISLRTLIDHSVVESFGGGGRACITARVYPEHVATSSSHLYVFNNGSDAVKVAKLEAWDLATATVNVVVGDHHGLVAPALELEPTRTTQ

SEQ ID NO: 28619 - protein, 1349 aa, Solibacter usitatus Ellin6076
MFDTVQRLSPRQETGILVACLAVAAGVVQLRAEDRFAWRSWGVREGLTETYSFALSVTPGQGAFIRHGAVPSMSVFDGIGVTRLPDPRGGGQPDWPSTRRVYPAPSGTPAGTPWTSTPKALLQYKEGKWRVRYTAPAGQQLMAAVPAGRRVLVLLDDSLREFDPESGTWRELRSVRNSRVGPFRGMCSGGVGEWYITAEQGLARLRLERDGGAFEWTEINSRASGLRSFNYPIAGSGEVFAQATSARDPRRVIVRWSGGELEVVYAAQSDNLRGWRAGDGSLWILEGGDLFFLLNGHRYPVERTGVLSGNIFDVYSEAGNAFWVATSEGITRHTPSLWQAPAGLAGFDLPVHSIAEDRQGRIWMSATEYLLEQVGDGWKFHKLPFGFRTHTVQTESLAPLPDGRVLVKVVRADRSDAVLALDPVSGRFSELAQPEGRRITLLERRPAGGVWAGSEVDGKPGFRLEFYDGRDFRKVLELGSEWHGANLRCVLERDGEIWLGGSAGGGLYRGGRFSEPLQAANGYPGTAVFVLGLTPGGELVAGGRDQIFKFDDRSWTVVRQDLDRIRQFSHTRDGALWVASASGVHRYKDGSWITHQAEEGLPSVIAYTVFEDSRGRLWAGTTRGVAMYHPEADPDPPRTTLDPGANLTEASLSGEARITFGGIDKWSLTPADRLLFSYRLDGGPWSPFEDVDLATYHGLRAGTHHFDVRSMDRNGNIDRAGQSFAFAVPWPWFRQLGFLALLSVGSCAIIVLACVAAIQYRRRGSLILELNRAKEQAEAASRHKTEFLANMSHEIRTPMNGVIGMTGLLLDTELTTEQRDYAGTVRRSGESLLTLINDILDFSKVEAGKLAIEASAFDLRSTIEEVDEMLAPKIENRKLDLVLQYPVGAPRHFVGDAGRIRQVVTNLVGNAIKFTGEGSIVIEVVCESQDEARAVMRVAIHDTGPGIPSEKIGSLFEKFSQLDGSTTRKYGGTGLGLAISKQLVSLMGGSMAVSSRLGEGSTFSFTLPLPLDANSPVEPLTAAGLRGLRALIVDDNEINRRVLHEQIIGWGMRNGSFAAGEEALVALRAAHAAGDPYHFAILDYRMPGMDGVEVARAIKADDELRETVVVLLTSVGQWSEARQKESGIVDASLVKPVRQSQLLNILSSCWVRTNSITAAPAVRPEPPVNEMRAALALRFGGVPVRVLVAEDNVVNQKVSARMLDKLGIRADVAADGREAVALFGLVPYDLIFMDCQMPEMDGYAATREIRRREGPGRRVPIAAMTAEVLGGCRELCLAAGMDDHIPKPVKMEVLFETLRRWIPARNCPEPGDSAMLTSGCAASRDGGNVSPDRPAGAAPLVRAGPPAAP

SEQ ID NO: 28620 - protein, 232 aa, Stephanomeria lactucina
GGRYSVCSAVGVLPLSLQYGFPVVEKFLKGARSIDQHFLSAPFEKNIPVLLGLLSVWNVSFLEYPARAILPYTQALEKLAPHIQQVSMESNGKGVSIDGVRLPFEAGEIDFGEPGTNGQHSFYQLIHQGRVIPCDFIGIVKSQQPVYLIDEVVNNHDELMSNFFAQPDALAYGKTPEQLQSENVASHLVPHKTFTGNRPSLSLLLPSLDAYRIGQLLAIYEHRIAVEGFIWG

SEQ ID NO: 28621 - protein, 565 aa, Frankia sp. EAN1pec
MIDDGRPGWSGAGAGPVTSASAGVSPATSVSIATDASGTSASAGTGIGPRIVGPPAPATGIRVAARASGPGPGGGGSGGGSGGGGGVSATRFWVAGQRRSAAEAFEVRSPFDGRLVGMVARPDDIDVEDALVAAVRAAPVCAALPAHVRAGALSSVSRAIARRGDEIASLITSESGKPLTWARAEVARASSTFRWGAEEARRFAGDLDRLDTDPTGEGRIALTRRFPIGPVLGITPFNFPLNLVAHKVAPAIAAGAPILVKPAPRTPLSALLLGELLADTDLPEGAWSVLPVADDRMPALVADPRLPVVSFTGSGQVGWAIRDAVPRKHVVLELGGNAAVLIAADYSSPADLRHAARRIALFSNYQAGQSCVAVQRVFVDRSLFGRARKEIVTAVLELRGGDPADPATDVGPLIDTAAAERVAAWVAEAVARGATVLCGGTRQGTAFAPTVLTGVPRDAAVVREEVFGPVLVLEPVDGLDDGLARVNDSSYGLQAGVFTHDLATAFRAHRTLAVGGVIIGDVPSYRADQMPYGGVKGSGLGREGVSSAMADLTVERVMVLAGVEL

SEQ ID NO: 28622 - protein, 593 aa, Paracoccus denitrificans
MRMTTEESFVKTLQLHGIEHAFGIIGSAMMPVSDLFPRAGITFWDCAHETNAGMMADGFTRSTGRMSMAIAQNGPGVTGFVTPVKTAYWNHTPLLLVTPQAANRTIGQGGFQEMEQMRIFADCVCYQEEVRDPSRIPEVLNRVIMQAWRNSAPAQINIPRDFWTQVIDVDLPQVVGFERPAGGERAVAEAARLLSEARFPVILSGAGVVLSGAIPDLVGLAERLDAPVCSNYQHNDSFPGSHPLAMGPLGYNGSKAAMEIIARADVVLALGTRLNPFSTLPGYGIDYWPKDARIIQVDINADRIGLTKKVAVGIQGDAAKVARGILAQLAPAAGDAGRQERRDLVAQTRSRWAQELSSLDHEEDDPGTEWNEQARARDAGLMSPRQAWRAIMQAVPKEAIVSSDIGNNCAIGNAYPSFEAGRKYLAPGLFGPCGYGFPAILGAKIGNPEVPVIGFAGDGAFGISMNEMTACGREDWPAITMVIFRNYQWGAEKRNTTLWYDNNFVGTELDRDTSYAKIAQACGLVGVQVRSQEELTAALHDAVERQMQGRETTFIEVLLNQELGEPFRRDAMKKPVAVAGIDPADMRPQQGAA

SEQ ID NO: 28623 - protein, 448 aa, Roseovarius nubinhibens ISM
MRVLGPVHVWALGVGIVLVGEFMGWNFSVGKGGAMGALIACWVIGLLYTCVAMIDSEVTSTVAAAGGQYAQAKHIMGPLMAFNVGLYLVMAYTMLEAADALIVGDLLTILAEQTGYDALDPKPFVILIISMLAFLNYRGVFMTLTLNFIITAAAFVTIVILFVGVQPWTAGAVLKHSDLLTDLPYGWIGVIAAFQFGIWYYLGIEGTCQAAEEVRSPSRSLPLGTMTGIMTLLIAATLTWYVCSGLLPWEYLGQATVPLYDAARMTGSTTLQVFLFVGTLFAATASANGCINDASRAWFSMGRDRYMPHWFGAVHPRYRTPYRSILFLIPIAVSFAFTGLLDQVITFSILSGLLGYTFMPINMIMFRRKWPLGSIRRGYVHPFHPIPAIVLMLLCITTFFATYLGFGTQLLAMMLFYVVVSLWFSMHRYKYVRRADQFTMNWPKPQGY

SEQ ID NO: 28624 - protein, 215 aa, Ehrlichia ruminantium str. Gardel
MVEISGSILSADFANLGKSVEMLTVAGVDYIHVDVMDGSFVSNITIGPVVISAIRQYTKIPFDVHLMINASSNYIENFVDAGADIITIHAESEVHLDGVIKKIKAYGKSAGISLVPTSHHNILEYIICDLDLVLVMTVNPGFGGQRFITSQLNKISSIRNIIQKYSLNTKIAVDGGVNIENAKDIIDAGADILVIGSALFKSNNMSEYIKQLKSL

SEQ ID NO: 28625 - protein, 334 aa, Wolbachia endosymbiont of Hishimonoides sellatiformis
QALEKSLCDKKIQLGINLTKGLGAGALPDVGKGAAEESIDEIMEHIKDSHMLFITAGMGGGTGTGAAPVIAKAAREARAVVKDKGAKEKKILTVGVVTKPFGFEGVRRMRIAELGLEELQKYVDTLIVIPNQNLFRIANEKTTFADAFQLADNVLHIGIRGVTDLMIMPGLINLDFADIETVMSEMGKAMIGTGEAEGEDRAISAAEAAISNPLLDNVSMKGAQGILINITGGGDMTLFEVDAAANRVREEVDENANIIFGATFDQAMEGRVRVSVLATGIDSCNDNSSVNQNKIPAEEKNFKWPYNQIPISETKEYASTEQTNERVKWGSNVY

SEQ ID NO: 28626 - protein, 542 aa, Zea mays
  misc_feature (68)..(68): Xaa can be any naturally occurring amino acid
  misc_feature (186)..(186): Xaa can be any naturally occurring amino acid
  misc_feature (203)..(203): Xaa can be any naturally occurring amino acid
MAHLAHDYFLPEDKPPLGPYIDTAPSPTSFIPQLETEEEDEVFHTSPSCSTMVPNRDATTSMLAMVEXTWSDEYALVDLQSVCYYSTSNAKPKLNSLDEVDPKLLKTFIPLTEQKHLSDVAIDAVIDSASITITHHEALMAKGVIFCSIPKSICEYPDLVRHYLGSIVLPGDNYYAALNSAVFSDXSFCFVPKDTICPMEISXYFRINNKETNQFERTLIVAVERCTYVLLIELCLQVDGVKVRLPPWPPPVWTFWLPYDVCSGMHYNCRDCAWFKGIWQPLFLVTPFYIRQLKLGWDVFLGKEIGEPQGLKWLAVSSGNMAEKMQKEDKYDYFSEFFELAAEFSSSDNGEDGATLVMYKHYVATAISKGIHCLSLRLTDEYSSNAHARNQLLPPELLFLLSDNSLQHYILASDNILAALVVVSSTVRSSSVPEKVVFPIITDTKTSVADLSPLWAINLEGKVNGAVETCKREDNWVMCKRFRTYFNFSHTMIAQRLDPNECDWAYALHTCLHYYCLHYLRLGGKPYFKRWGMSAHLHVGNG

SEQ ID NO: 28627 - protein, 232 aa, Triticum aestivum
  misc_feature (30)..(30): Xaa can be any naturally occurring amino acid
MIAKLQIISSCSERALEASGDDLDLPIRSXNDLRLESAEAIFSAAVSEPENALSTALKLSAEGNGQLDTISGNPPATDNCQTNHHSSEWVELFVREMMSASDINDARARASRALEVIEKSIMERTGAEAVQNLHKENTMLKEQLAIALRENAVLKRGVAIQHERPKEFDDKTQEVHNQKQLILQYQEQLKTLEINNYALRMHLQQAQQNSSMPTSAATTLITSPAACRSTIR

SEQ ID NO: 28628 - protein, 296 aa, Mycobacterium avium subsp. paratuberculosis K-10
MTIPWTPDRLGDLTGRRVIVTGATNGVGLGTARALAKAGAEVILAVRNTELGKQRAAQMGGSTAVEKLDLADLSSVRAFADRIEAPVDILINNAGALTDRRTETVDGFEMTLGTNLLGPFALTNLLLPKVRSQIINVGSDAHRSATLHLDDLHLRRHKWTRLGAYAQSKLAVMLWGLELDRRLRAAGSPIVTQLTHPGWVASNLSNLGDAPLKAVAHKAVKVVADRLANDIDEGAAPTLYCISEPIPPGSYVGVSGRFGLRGGPVLIGRTPLACDYDTAARLVAFAERETGTELRV

SEQ ID NO: 28629 - protein, 334 aa, Wolbachia endosymbiont of Hishimonoides sellatiformis
QALEKSLCDKKIQLGINLTKGLGAGALPDVGKGAAEESIDEIMEHIKDSHMLFITAGMGGGTGTGAAPVIAKAAREARAVVKDKGAKEKKILTVGVVTKPFGFEGVRRMRIAELGLEELQKYVDTLIVIPNQNLFRIANEKTTFADAFQLADNVLHIGIRGVTDLMVMPGLINLDFADIETVMSEMGKAMIGTGEAEGEDRAISAAEAAISNPLLDNVSMKGAQGILINITGGGDMTLFEVDSAANRVREEVDENANIIFGATFDQAMEGRVRVSVLATGIDSCNNNSSVNQNKIPAEEKNFKWPYNQIPISETKEYASTEQTNERVKWGSNVY

SEQ ID NO: 28630 - protein, 413 aa, Magnetospirillum magnetotacticum MS-1
MPTPLSARTIAVVKATIPALETHGLTITRRMYERLFQNTDIRDLFNQSHHGETGSQPKALALAVLAYARNIDNLGVLTGAVERIAQKHVALNILPEHYSFVADALIGAIQDVLGEAATPEIVEAWGEAYWFLAELLIGREATIYRDLASKSGGWNGWRDFVVESVTPESEIIRSFVLVPADGGPVLRHEPGQYLGFLLDLPGRGVLKRNYSISCAPNDRAYRITVKREAKTEHPAGLVSNWLHDAAIAGTVLKVAAPAGDFFLDRSSNAPVVLVSGGVGLTPMVSMLESITETTPERPTWFVHSALNGRVHALREHVRNLAANRDNLRVRIFYTAPEAQDRVGEAYDIPGPVTAEWLVANTPSEQATYYLCGPKSFLASLANGLVRAGIPAERVRFEFFGPADALLEEPKQAA

SEQ ID NO: 28631 - protein, 413 aa, Frankia sp. EAN1pec
MKSGTSSCPPAPRPVPPDHARENGSGPEPGPGPGPVRFCDTTLRDGEQTPGVAFTAKEKIAIAVALDAAGVHQIEAGVPAMGPVEVDVLRRVVAAVERAGVVAWCRADRRDVDAAVASGVDAAHLTIPASDLHLRTKLGKDRAWARARIRDCVLDATDRGLRVSVGFEDASRADDGFVIDLAGELRRLGVTRFRWADTVGVANPITLHTRLRALLDAVPGPWEIHAHDDFGLATANTIAAVQAGFTWVSTTVAGLGERAGNAPTEEVAMALRHLLGLPVDLDTAAFRPLARLVAGASRRPVPAGKAVVGDAVFDHESGIHVHGVLRAPATYEPFDPAEVGARRRLVLGKHSGRAAVRHAMDRHGIDAPDEDLEPIVGLVRAHATVYKQPMSSDQLRAMARRVATRRGARPRRG

SEQ ID NO: 28632 - protein, 595 aa, Aspergillus oryzae
MARLPSQQGRQVHATSTSYVNHAAPVEANYDTANPPYIRKYLRTYGLTPPRAESYEVQKTRCLAQLALKQTAIDKFLYLSTLRKNNVHLFYRLVTDHLRELTPLIYTPVVGEACQRWSEIYQQPEGMYLSWEDRGNLAAVIANWPQPNVEITCITDGSRILGLGDLGINGMGIPIGKLALYTACAGIRPEATLPLTLDLGTSNKTLREDPLYMGSNRDKITPEEEREFMDELMSALTERWPGIVIQFEDFKNPFPALERYRDIYTCFNDDIQGTGAVILGGVINAVKRSGLPCKDHRAVFFGAGSAGVGVAKQIVAFFMREGMTEDEARSCFYLVDTKGLVTNDRGDKLAEHKVYFAREDNEGQQYKTLEEVVDYVKPTILMGLSTIGGVFTPEILRKMADWNTAPIIFPLSNPSSKSECDFETAITHTDGRALFASGSPFQPFSFTNSAGETRTYYPGQGNNMYVFPGIGLGTILSKAVKITDSMIYASGAALSQALTAEEIERGLLYPDLTRIRQVSVVVTRKVIRAAQEDKVDRETALRSMNDDALDAWIKARMYDAHSEVLALEREVGALLHNLNPASLLNGLSSEENAKL

SEQ ID NO: 28633 - protein, 497 aa, Pseudomonas aeruginosa UCBPP-PA14
MSVPVRHLIAGAFVEGLGAQRIPVSNPLDNSTLAEIACASAEQIEQAVASARETFASWKETPVSERARVMLRYQALLKEHHDELAKIVSSELGKTFEDAKGDVWRGIEVVEHACNVPSLLMGETVENVARNIDTYSITQPLGVCVGITPFNFPAMIPLWMFPLAIACGNAFILKPSEQVPLTSVRLAELFLEAGAPKGVLQVVHGGKEQVDQLLKHPQVKAVSFVGSVAVGQYVYHTGTAHNKRVQSFAGAKNHMVIMPDADKAQVISNLVGASVGAAGQRCMAISVAVLVGAAREWIPEIRDALAKVRPGPWDDSGASYGPVINPQAKARIERLIGQGVEEGAQLLLDGRGYKVEGYPDGNWVGPTLFAGVRPDMAIYREEVFGPVLCLAEVDSLEQAIRLINESPYGNGTSIFTSSGAAARTFQHHIEVGQVGINIPIPVPLPFFSFTGWKGSFYGDLHAYGKQGVRFYTETKTVTARWFDSDSVAGTNFSIQMR

SEQ ID NO: 28634 - protein, 121 aa, Triticum aestivum
  misc_feature (91)..(91): Xaa can be any naturally occurring amino acid
  misc_feature (103)..(103): Xaa can be any naturally occurring amino acid
MAAPRGAALVLAMVLAAMLVAPPATVHAISCSTVYSTLMPCLQYVQQGGSPARGCCTGIQNLLAEANNSPDRRTICGCLKNVANGASGGAXITRAAALPSKCXTSPLPYKISPSVDCNSIH

SEQ ID NO: 28635 - protein, 334 aa, Bacillus cereus ATCC 10987
MTKIGINGFGRIGRNVFRAALNNPEVEVVAINDLTDAKTLAHLLKYDTVHGTLNAEVSANESSIVVNGKEIKVIAERDPAQLPWSDYGVEIVVESTGRFTKKADAEKHLGGSVKKVIISAPASDEDITVVMGVNHEQYDAASHNVVSNASCTTNCLAPFAKVLNEKFGVKRGMMTTIHSYTNDQQILDLPHKDLRRARAAAENMIPTSTGAAKAVALVLPELKGKLNGGAVRVPTANVSLVDLVVELDKEVTVEEVNAAFKAAAEGELKGILGYSEEPLVSIDYNGCTASSTIDALSTMVMEGNMVKVLSWYDNETGYSNRVVDLAAYMTSKGL

SEQ ID NO: 28636 - protein, 140 aa, Shewanella sp. MR-7
MIIACPHCDTLNRVPQERLTEQPTCGKCKQDLFTAAPIELTSANFINHAHKSELPIVVDFWASWCGPCKSFAPTFSAAAKAWEPQFRFGKINTEEQQALAAQFGIRSIPTLMIFKQGHLIAQQAGALPKSALDQWLQSYC

SEQ ID NO: 28637 - protein, 391 aa, Silicibacter pomeroyi DSS-3
MAKEKFERSKPHVNIGTIGHVDHGKTTLTAAITKYFGDFKAYDQIDGAPEEKARGITISTAHVEYETDSRHYAHVDCPGHADYVKNMITGAAQMDGAILVVNAADGPMPQTREHILLGRQVGIPFMVVYMNKVDQVDDEELLELVEMEIRELLSSYDYPGDDIPIIRGSALHAMNGTEPSMGEESIRALMAAVDEYIPTPARAVDQPFLMPIEDVFSISGRGTVVTGRVERGVINVGDSIEIVGIRDTKTTTCTGVEMFRKLLDRGEAGDNIGALLRGIDREGVERGQVLCKPGSVTPHTKFEAEAYILTKEEGGRHTPFFANYRPQFYFRTTDVTGTVTLAEGTEMVMPGDNVGFTVELIAPIAMEDGLRFAIREGGRTVGAGVVSKIIE

SEQ ID NO: 28638 - protein, 277 aa, Triticum aestivum
AYLGDTIEQVCTKKQAGTGPEFPGYRRPTRPLDLDSPTEGFSSISEAIEDIRQGKLVIVVDDESRENEGDLILAASLVTPEAMAFIVRHSTGIVCVSMKENDLERLNLPLMVSTKENEEKLCTAFTITVDAKEGTTTGVSAKDRAKTVMTLASPYSKPEDFNRPGHIFPLKYRDGGVLKRAGHTEASVDLAVLAGLPPVGVLCEIGDEDGSMARLPKLRLFAEKNNLKIVSIADLIRYRRKRDRLIERASVARIPLRWGNVRAYCYRSVIDGIEHIA

SEQ ID NO: 28639 - protein, 390 aa, Prosthecochloris aestuarii DSM 271
MRIGVLTGGGDAPGINACLKTIVTQCDEYGFEVFGIKRGWEGLLSLNPDVPDERSLHIVPLTRHLVRKIDRTGGTFLHSSRVNPGNLSRKEVPLFLQCALKRMGRGLINAAHFDATFHVLRVLEHLGLDTLIVIGGDDTISYAWHLQQQGVAVVAIPKTMDNDVFGTDYCIGFGTAVTRSVQYIHQLRTSSGSHERITIVELFGRHTGEACLVSSYLAGVDRTLIPEAPFDPERLADLLIFDKAANTSNYAMVAVSEGARMVGGKFIEYCRHHIDDHVLQRDGIGQLIRDTMTMLTGEEIIWQPLGYLMRSGIPDALDIMVGCNFAQLAVELIRKNVSGVMVALSKGVYDHVPLAVVASGTHQVDIAELYDPEEYRPKMRCVLGKPMFFY

SEQ ID NO: 28640 - protein, 320 aa, Burkholderia thailandensis E264
MSTPKHAKVLILGSGPAGYTAAVYAARANLSPLLITGIAQGGQLMTTTDVENWPADPNGVQGPELMQRFLAHAERFNTEIVFDHIHTAKLHEKPIRLVGDSGEYTCDSLIIATGASAQYLGLPSEEAFMGRGVSACATCDGFFYRGQNVAVVGGGNTAVEEALYLTGIAKKVTVIHRRDKFRAEPILVDRLLEKEKEGTVEIKWDHVLDEVTGDDAGVSGVRIKHVTTGATEDVAVQGLFIAIGHKPNTDIFKGQLEMKDGYIITNGGLSGNATGTSVPGVFAAGDVQDHIYRQAITSAGTGCMAALDAQRYLESLHDHK

SEQ ID NO: 28641 - protein, 512 aa, Aspergillus nidulans FGSC A4
MALLGLLETYRDPLAFVAALSAVFYLLSCLHRRWRRYQFAKENGCEPVVGKIPSYDPFLSLDRLYRLTKLARNRKLLENNVQRFKEFGNTHRAKRITTPMIVTRDPQNIKAILSLKFGDYSMGDRIRIFGPLLGHGIFTSDGEDWARSRHMIRPNFVKEQVAHLEIFEELMDDLFALIPTDGSTVDLQELFFGFTIDSATEFLCGHNVHSLKKRRSGVIDDEPDFAEAFNYSLDNISKNGRFGPLMFLNRDPKAVESHRICHESMDQFVDKAIRMRERYNEEKIVDEAAERRYMFLYGLAQQTGDRRRIRDEVLNILLAGRDTTASLLSNMFFLLAKHPSTWAKLQEEVATLEGRAPTYEQLRNMKYLKYCLNETLRLFPVVPVNSRTAIRDTVLPVGGGPDGQSPAFVPKGTMVAYSVYAMHRREDYYGADAEEFRPERWADLRPGWEYLPFNGGPRICVGQQYALTEAAYVTTRLAQRYSILESRDPGPWEEKLTLTLCSYNGTQVSLRH

SEQ ID NO: 28642 - protein, 357 aa, Leptospira interrogans serovar Copenhageni str. Fiocruz L1-130
MKKLLYTLNLSEQFLWEFPHFKNRWIRNKSQRFRFYSKGAFSQEFPQKDQKTFYLQKYDFMDCRNNLAPRLSKFRTSFLIINRWIEILFFWSFVLFCTFFSFPISAEIQWEKSVQIAFEKARSSGKPIFIDVYADWCSYCKTLKKEIYPKKEVQLELSKFVALSLDGDKFPNLKRKYGIKGYPSILFLDRNGSLIDKITGMPDSKMILKSLKNAYVRRNLENEYLENLTKDPQGIQTNFQAGVYYFEAKEYSKAIQFFQKAIDSNDSKNLEKKHDALFNLGISYLEIGNFKLAISTFNSYLSKYPNGDLVSVLFFRANAYEELNLKEEAKADYKKVLELTLDPDEKQDLQMRIDSLN

SEQ ID NO: 28643 - protein, 868 aa, Idiomarina baltica OS145
MTTFWTRFQIGFIAFQLISIISYLILPAPFSDYVLLTSVVVGLIAGTVIYTWTRQTSLTSPLRQPFLTASSQQLLQQVFNDLPTRVYWRNSDLEFLGGNDAFLRDIQCSTEALEGKRDDQLAWLAKNPILQERDRLTLEHGLASCNAEIELNLANNTRYIEHSSVPLYDDQKNVIGIIGSYYDISSIKSVAEQMEQAKESAEQANVAKGEFLANMSHEIRTPINAIVGMANLCLKTQLSEKQKRYIKVIDSSSQALLGVINDILDFSKIDAGKLSIERIPFDLQDVLTSLADMFAYKAYDKDLEFIINLPANIPTRLFGDPLRLNQVLVNLVSNAIKFTEDGEINVAVTLLDKNTDKVWLRISVTDTGIGMDEEQRANLFKAFTQADSSTTRKYGGTGLGLAISRRLIQLMGGDIGVTSGVGQGSTFYIELTLPMQPEQDDSHHQYLIQKLRGKRVLAIDDNLSTREMIQEMLRSYQVDVRVCRTAEQALDILREDLEPYDVLLVDWRLPGMDGLSLCQRVYQSLASEAPKMILATGYYAEEMSEQAAAAGISDILSKPFTATTLGHSLATTLYKRDDSISSKDAPATNLPDAIQGAPILLVEDNEINQQVALELLKSQGFKVDIAEHGQAALDAIEQKQYALVLMDIQMPVMDGLTAAKKIRSYYDYKQLPILAMTANAMSGDEERSLSAGMQGHIAKPIDEKQLIKAIIKWCVPGHYEDEPTQPADLEEASEHAQADEKRIRYPQVKGIQFEQALARLQHNVPLYLRLVEQLFNEYQNSAMKVSDFITRGQHESARRYFHSLKGAAANLGLEALQTRAADLEKHMAAGNIDKVADTITGLEKSLNHAHQAANDLAAIYQHQQQEQS

SEQ ID NO: 28644 - protein, 1496 aa, Ustilago maydis 521
MHRQNALKLETPGTSNDSELASRQFHFPYAEAYSIQLDLMRKVFSTIEDGKVGLFESPTGTGKSLSLICAAFTWLRQNAQRHTIGTSTNDGETHGSNHGPATQQEPDWVVKHKNELRRKQHEAYELDLKDRIAAARAKQAALKKSLQDGQVLLDAQARVAKRQRRSANDDDDKDSDDDLLIDEKEGAKSARTLQMATYSKTALSETSVEIDSSLSPAVRALMQQYEQASSRGREDEDEPETLPRVIYASRTHSQLSQFVAELKKTSFGQVDIIHAETLPIRTIPLGSRKQMCINEDVQRIGRNKGSEAMNERCIELIKGKTGKTKCSSLPPFDQTGRSRILEFRDAAMAEVGDIEDLVQLGKQTNTCPYFAARSSAKQAELITLPYNLLLQKDARNALGISLEGCIVLVDEAHNLIDTILSTHSVTIDSQQIAQASEQIDTYLDKFALRLKGSNEQNLRKVRKVLSSMSAFFSKKAAEGKTNAELVLSAADLVRSLTGNLDQINLVTLETWLKETQIARKISGYADKHSKMAVQQAAASVNQHNGTRTNKSRHPPKLLLENASPDSIRSASQSAISSMHAIETFILSLANRSEDGRVVLSSATNSAGENVVRAKYQLLNPSHVFRSLVDEARSVILAGGTMEPMSDFRQQLLPFVPPDRLVTFSCGHIIPASNLMVSVLSASPKGLPFEFKFDSRDNVELIDELGRTLVNVCNIVPAGLVVFVPSYAFLDKLMARWKDAASGGLLQRLGSKKKIFIEPKTTMEVDKVLGEYTAAIRAKDVKTGVSSGGAIMFAVVGAKLSEGINFSDNLARGVVMVGMPFANMHSPELAERMKYVRELAIKHESTACVTASQKPSDPQRVLTKYMSNTLLPPLQGHELYINLCMKAVNQSIGRAVRHQNDFAALILLDRSTAQYSVCGTTVNDTAVLSNAVGDPTLCTALRVATPRSTFHLHPHHHHPAISMLGRLNVPVESAYTSMLASTALRRSLKLASAAAPTVRLSQQLSKRRYVQQPSSTASIPIVIGSSSTSLRSFATTPRRLAVEVKPYLLADVGEGITECEIIKWFVQPGAVVQEFDPICEVQSDKASVEITSRYAGKIKRLMHKEGDVAKVGHPLCEIEMESDGENEASDAGEQRAEQAEVTSSSTESESRAVNMEGFMSAEQKHSNGGGHAASDRSVLATPAVRRVSREHNVDLAQVHGTGRDGRITKEDVLKHVSSAASNSSSSSASSTSGSGSAPSSLAAGTTEIVDLTPVQRAMFKAMTATLSTPHFAYSDEIDVTDLDQVRVLLSKSIPERYTQAGDASFTKLTLLPLLVKAMSLALHEHPMFRSTLNSDQKLVRRSSHDVSIALTSKVGLLTPCITDVQAKSIYDVSAFITRLQTVAGSSKGLAPADLKPTGTITLSNVGAVGGGTYTHPLLPPTGQLAIGALGRSRVLPRFASEIPSLGVSDPDKIVRRLIMSVSFTGDHRVVEGADLARLVNRWKQLVENPSLWLGLLA

SEQ ID NO: 28645 - protein, 390 aa, Nocardia farcinica IFM 10152
MDSRSVALIRTTFKAVAADDAGPDELARTFYAILFTDHPQIRDFFPAAMDVQRDRLVKAISYALDRLEEPDKLLPFLAQLGRDHRKYGVRREHYAAVADSLKAAVRRCAGTEMWTDEVDRAWDEGLALISDAMIGAAEKETSPSAWTGRVVETRQVLRNLTIVRLQLDQPMEYAAGQYMSVQIPSRPRMWRYLSPAVPANPQGEIEFHVRSILGGWVSPAVVSQTRVGDQWLIGSPLGGLGVPRNAKRKMLMIGCGTGIAPLRAQLLEMAQRRSNPKVHLFVGGHHPCDLYDLEMLSTLAVTNKWLTVTPVTEHEENPWWFYRAPDEPEPVFPALEPRLTGQLGKVVAEAGPWADRDVQIAGSPSMVQTTKFRLMAAGIPAKNIRHDPLF

SEQ ID NO: 28646 - protein, 291 aa, Crocus sativus
MTASISPAATTLAASSRRPPAGARVILFSPLSVRRVVDLWPSALGQRRRRRRTGTVFFVLAEEAEKRMAPSNRAAERSARKRSERRTYLIAAVMSSLGITFMAAAAVYYRFAWQMEGGDVPMTEMAGTFRLSVGGGPGDEFWPRWPHRASATRRSWHMHESHPPAEGKGPLSSSNDVFAIINAVPAIALLAFGFFHRGLLPGLCFGAGLGITLFGIAYMFVHDGLVHRRFPVGPIADLPYFQRVAAAHQIHHSEKFQGVPYGLFMGPKELEEVGGLEELEKEVSRLIKANH

SEQ ID NO: 28647 - protein, 330 aa, Triticum aestivum
  misc_feature (193)..(193): Xaa can be any naturally occurring amino acid
  misc_feature (232)..(232): Xaa can be any naturally occurring amino acid
  misc_feature (282)..(282): Xaa can be any naturally occurring amino acid
MAAPIPREWVGLQQFPAATQTKLHELLGKLKEENVSTLTILVMGKGGVGKSSTVNSIVGERVANVSAFQSEGLRPMMCSRTRAGFTLNIIDTPGLIEGGYINEQAAVEIIKRFLVEKTIDVLLYVDRLDTYRMDTLDEQVIRAITNSLGKAIWRRTLVVLTHAQLSVSFADGMAYYDFLARRSESLLRYIRSXAGIGNREYADFPLPIALAENSGRCKTNENGAKILPDGTXWIPNLMKEVTIVVSNGSKSIHVDQKLIDGPNPNNRWKKYIPLILAVQYFXLVVKGIRRAIHSDIPNGKLDDWEHPFRDLVGSGNPVDQKVSSSRNPKA

SEQ ID NO: 28648 - protein, 232 aa, Stephanomeria tenuifolia
GGRYSVCSAVGVLPLSLQYGFPVVEKFLKGARSIDQHFLSAPFEKNIPVLLGLLSIWNVSFLEYPARAILPYTQALEKLAPHIQQVSMESNGKGVSIDGVRLPFEAGEIDFGEPGTNGQHSFYQLIHQGRVIPCDFIGIVKSQQPVYLKDEVVNNHDELMSNFFAQPDALAYGKTPEQLQSENVASHLVPHKTFTGNRPSLSLLLPSLDAYRIGQLLAIYEHRIAVEGFIWG

SEQ ID NO: 28649 - protein, 426 aa, Exiguobacterium sibiricum 255-15
MVLLIVLTAFFVGSEFAVVKVRMSRLDQMIQEGNKSAVLAKKIAGDLDYYLSACQLGITVTALGLGALGEPTVEKILHPVFDEFGVSAAVSTLLSFGIAFVSVTFLHVVIGELAPKTLAIQYAEKMTLLFARPLYIFGKILYPFIWLLNGSARFFLGLFGVKPAGHEQAHSEDELKIIMAQSFQSGEINQTELALMQNVFAFDEHIVKDLMVPRMRMATISERLSKDELMEIFMDNPFTRYPVTEENDKDRILGYVNVKEMLTDFANGNHHPVTHYVKDLPVVSEVTSLQDTLRKMKKTRSHIVLVVDEYGGTAGIVAMEDLLEEIVGEIRDEFDTDEVEEIQELPNNEYLVAGTVLLEDLEARFGMTFTNDEDVDTIGGWIQMHNIDLQPGEHIDTEAFSVEVIEMENYQINQIKLWLHPLEQAE

SEQ ID NO: 28650 - protein, 370 aa, Cryptococcus neoformans var. neoformans B-3501A
MANILKRSALKLGMIPADGIGKEVLPAAQRVIEALGSSIPKTTFVPLVAGWEEFNKNGKALPDDTVSALRECDGAMFGAVSSPSHKVAGYSSPIVALRKHLDLYANVRPVSSVPIPGQPSAKAVDLVIVRENTECLYIKQEEISGEGEDRVALATRKISAKASSRIGRMAFEIALRRGQEREAARAAGKDVWWKGEPKVTIVHKSNVLSVTDGLFRETVRAVKEGKGGEKYAGVKLEEQIVDSMVYRMFREPEFFDVCVAPNLYGDIISDGAAALVGSLGLVPSINAGDNFIMGEPVHGSAPDIEGKNIANPIASIRSAALLLSSLGYIEPAAKINAAVNAVLVEGQYLTPDLGGKSSTTEVTEAVLKRL

SEQ ID NO: 28651 - protein, 509 aa, Staphylococcus aureus subsp. aureus Mu50
MSSHIQIFDTTLRDGEQTPGVNFTFDERLRIALQLEKWGVDVIEAGFPASSTGSFKSVQAIAQTLTTTAVCGLARCKKSDIDAVYEATKDAAKPVVHVFIATSPIHLEHKLKMSQEDVLASIKEHVTYAKQLFDVVQFSPEDATRTELPFLVKCVQTAVDAGATVINIPDTVGYSYHDEYAHIFKTLTESVTSSNEIIYSAHCHDDLGMAVSNSLAAIEGGARRIEGTVNGIGERAGNAALEEVALALYVRNDHYGAQTALNLEETKKTSDLISRYAGIRVPRNKAIVGQNAFSHESGIHQDGVLKHRETYEIMTPQLVGVSTTELPLGKLSGKHAFSEKLKALGYNIDKEAQIDLFKQFKTIADKKKSVSDRDIHAIIQGSEHEHQALYKLETLQLQYVSSGLQSAVVVVKDKEGHIYQDSSIGTGSIVAIYNAVDRIFQKETELIDYRINSVTEGTDAQAEVHVNLLIEGKTVNGFGIDHDILQASCKAYVEAHAKFAAENVEKVGN

SEQ ID NO: 28652 - protein, 232 aa, Stephanomeria tenuifolia
  misc_feature (54)..(59): Xaa can be any naturally occurring amino acid
GGRYSVCSAVGVLPLSLQYGFPVVEKFLKGARSIDQHFLSAPFEKNIPVLLGLXXXXXXSLLEYPARAILPYTQALEKLAPHIQQVSMESNGKGVSIDGVRLPFEAGEIDFGEPGTNGQHSFYQLIHQGRVIPCDFIGIVKSQQPVYLKDEVVNNHDELMSNFFAQPDALAYGKTPEQLQSENVASHLVPHKTFTGNRPSLSLLLPSLDAYRIGQLLAIYEHRIAVEGFIWG

SEQ ID NO: 28653 - protein, 159 aa, Prunus avium
SKTLAEKAAWEFAKEKGLDVVVVNPGFVMGDVISPRLNASMVTLVRLLEGCIETYENIFMGSVHFKDVALAHILLHENKSATGRHLCVEAISHYGDFVAKVAELYPEYKVPSLPKDTQPGLLREKNGAKKLMNLGLDFIPMDQIIKDAVESLKNKGFIS

SEQ ID NO: 28654 - protein, 106 aa, Streptomyces aureofaciens
GATVKVTNATFKSDVLESDKPVLVHFEGPWCGPCKMVAPVLDEIANEYEGKVKVAKVNTDENPQLASQYGVRSIPTLLMFKGGEVAANMVGAAPKTRLAAFLDASL

SEQ ID NO: 28655 - protein, 546 aa, Salinibacter ruber DSM 13855
MSDSITIFDTTLRDGEQAPGASMTVPEKVHIAHKLADLNVDVIEAGFPISSPAQTEAVTRIATEVDGPVTCALARTKEDDIDAAGEALADGTDTRLHTFIATSDVHIEAKFDKLGNTMAEKREAIIQRAVRAIEQALTYTDNVEFSAEDAGRTDPEFLCEVVQAAAEAGATTINIPDTTGYCAPSEYTDLLETVVDCLPDPDAVTLSTHCHDDLGLATANTLAGIRAGARQVECTINGIGERAGNAALEEIVMALTVRADAFDVTADVHTEHLTPTSQTVSAATGFPVQPNKAIVGSNAFSHEAGIHQHGVLEERTTYEIMSATDVGQDAEQIRLGRHSGRHGLFNRLEAMGYAVPEGHRDALYDRFLDLADRKKEVFEEDLEQMMNDFGGDAVAAATGLPDNGVALNGGTPAYRLDQFSVHLSSDDEAKVSVRLQRDDGSAREEQATGEGPVDALYRALDHAVDAPHTLVDYSIRSISEGADAQGEVEVTIRYGENQFAGTARNTDVIRASAEAYVDALNRLVAAQEHAESVEFVQNGIMHTYGE

SEQ ID NO: 28656 - protein, 556 aa, Legionella pneumophila subsp. pneumophila str. Philadelphia 1
MAIKVTKRGMDILRDPILNKGTAFSLQERDEFALHGLIPTTVETLEQQVVRCLDAYSAKEDPLEKHIYLRALQDRNEVLFYRFIIDNLVHILPIIYTPVVGQACEMFSHIYRQPRGVFLSYPERDKLDSIIQNIASTRSTKVIVVTDGERILGLGDQGAGGLGIPIGKLSLYTSCGGIHPSNTLPIILDVGTNNKERLDDPEYIGWRHARISGKEYDDFVDQFVQSIKRHMPHVLLQFEDFAQQHAYPLLERYKNQLCTFNDDIQGTASVAVAAILAATRVTNTPLKEHRVALLGAGSAGCGISEQLVHAMMNQGLSEEEARSRFYLVDRYGLLHDEMTDLLPFQKGFVRSSTSLQNWKLEKKGEITLTDVINNAQPTILLGVSGQPNQFKEAMIKTMLSYCERPIIFPLSNPTSRAEAIPQDLLNWTAGKALIATGSPFEPVVINGHKIEIAQCNNSYIFPGVGLGVVAGQAKRVTDLMMMAAAVALSELAPAIRTGEGRLLPELNSIREVSQHIARAVILQGIKEGHIEPMNNNKIDDSIKRTMWTPQYEPYVL

SEQ ID NO: 28657 - protein, 506 aa, Bacillus thuringiensis serovar konkukian str. 97-27
MKQILFMDTTLRDGEQSPGVNLNEQEKLQIARQLERLGIHVMEAGFAAASEGDFQSVKRIANTIQNATVMSLARAKESDIRRAYEAVKGAVSPRLHVFLATSDIHMKYKLCMSKEDVLDSIHRSVTLGKSLFPTVQFSAEDATRTARDFLAEAIEVAIRAGANVINIPDTVGYTNPEEYYSLFKYLQESVPSYEKAIFSCHCHDDLGMAVANSLAAVEGGALQVEGTINGIGERAGNAALEEVAVALHIRKDFYKAEPSITLKEIKATSTLVSRLTGMVVPKNKAIVGANAFAHESGIHQDGVLKEVTTYEIIEPALVGESQNLFVLGKHSGRHAFTEKMKELGYEFTNDERDAVFEAFKKLADRKKEITEEDLRALMLGEAAFAAQQYNITQLQVHFVSNSTQCATVVLKDEEGNVFEDAATGSGSIEAIYNAIQRILGLECELADYRIQSITQGQDALAHVHVELKEGAHQVSGFGVAQDVLEASARAYVHAAGKLKSFIQLVK

SEQ ID NO: 28658 - protein, 354 aa, Bacillus thuringiensis serovar konkukian str. 97-27
MEKRIVCLAGDGVGPEVMESAKGVLHMVERLYGHHFHLQDEHFGGVAIDLTGQPLPQRTLAACLASDAVLLGAVGGPRWDGAKERPEKGLLALRKGLGVFANVRPVTVESATAHLSPLKKADEIDFVVVRELTGGIYFSYPKKRTDEVATDTLTYHRHEIERIVSYAFQLASKRKKKVTSIDKANVLESSKLWRTVTEEVALRYPDVELEHILVDAAAMELIRNPGRFDVIVTENLFGDILSDEASVLAGSLGMLPSASHAEKGPSLYEPIHGSAPDIAGKNKANPIAMMRSVAMMLGQSFGLTREGCAIEEAISAVLKSGKCTADIGGAETTTSFTKAVMQEMEEQALVGRGR

SEQ ID NO: 28659 - protein, 341 aa, Chlamydia trachomatis
MTTWDLAMRIVINGFGRIGRLVLRQILKRNSPIEVVAINDLVAGDLLTYLFKYDSTHGSFAPQATFSDGCLVMGERKIRFLAEKDVQKLPWKDLDVDVVVESTGLFVNRDDAAKHLDSGAKRVLITAPAKGDVPTFVMGVNHQQFDPADVIISNASCTTNCLAPLAKVLLDNFGIEEGLMTTVHAATATQSVVDGPSRKDWRGGRGAFQNIIPASTGAAKAVGLCLPELKGKLTGMAFRVPVADVSVVDLTVKLSSATTYEAICEAVKHAANTSMKNIMYYTEEAVVSSDFIGCEYSSIFDAQAGVALNDRFFKLVAWYDNEIGYATRIVDLLEYVQENSK

SEQ ID NO: 28660 - protein, 574 aa, uncultured delta proteobacterium
MRYSEMHLPTLREIPSDAEVVSHKLMIRAGMIRKLTSGIYSYLPLGYRVIRKVEQIVREEMNKAGAQEVFMPMVQPSELWEESGRWVHYGKELLRFRDRHDRPYCFGPTHEEVITDLVRNDVKTYRQLPLNLYQIQTKFRDEVRPRFGVMRCREFGMKDAYSFDADEAGAQNSYEKMFTAYNNIFRRCGLRFRPVEADSGSIGGKYSHEFMVMADSGEDAMVFCEKCSYAANLEKAEIAQPAKKNIAEKDLLPLENIHTPNVRTIEEVSVFLKVKAQNIVKTLIFNADGQPCAVLIRGDQEVNEIKVKNYLGAALLELADDEMIKKATGAPRGFAGAVNIKTKVIADYSIMNMINFVTGANKQDYHLKNVNAGRDFQVEAYTDLRVVEENDSCPRCAGKIKFARGIEVGHVFKLGTKYSKAMKAVYLDKDGQEKVMIMGCYGIGIGRTVAACIEQNYDDQGIVWPVPLAPYHVIITPVNVNDKSISDVAENLYNKMQDKKIEVILDDRDERAGVKFNDADLIGIPLRVVIGQKNLAQNKVELKIRKTGENKLIAVDEIVNEVKEFVNKAFSSAP

SEQ ID NO: 28661 - protein, 421 aa, Silicibacter pomeroyi DSS-3
MRRVVVTGLGLITPLASGVEETWSRLLEGQSGAGPITRFDAVASGVTTTYACEVPRGDGSDGTFNPDDWMAPKEQRKIEDFILYSIAAAEMACKDANWLPEDEEDRLRTGVLIGSGIGGLGSIAETANLIKEKGPRRVSPFFIPGALINLASGQVSIRHGFKGPNHSVVTACSTGAHAIGDASRIIRAGDADVMIAGGGEACICEIGIAGFNACKALSTKYADNPKAASRPYDADRDGFVMGEGAGIVVLEDYEHAKARGAKIYAEVLGYGMSGDAYHITAPSETGDGAERSMRAALRSAGLEPSDLDYINAHGTSTMADTIELGAVERLLGNHAANVTMSSTKSATGHLLGAAGAIEAIFSILAIRDQVAPPTINLDNPAVETPVDLAPNAKRARKIDVALSNSFGFGGTNASVIFGKAD

SEQ ID NO: 28662 - protein, 315 aa, Wolbachia endosymbiont of Ostrinia scapulalis
LCDKKIQLGINLTKGLGAGALPDVGKGAAEESIDEIMEHIKDSHMLFITAGMGGGTGTGAAPVIAKAAREARAVVKDKGAKEKKILTVGVVTKPFGFEGVRRMRIAELGLEELQKYVDTLIVIPNQNLFRIANEKTTFADAFQLADNVLHIGIRGVTDLMIMPGLINLDFADIETVMSEMGKAMIGTGEAEGEDRAISAAEAAISNPLLDNVSMKGAQGILINITGGGDMTLFEVDAAANRVREEVDENANIIFGATFDQAMEGRVRVSVLATGIDSCNDNSSVNQNKIPAEEKNFKWPYNQIPILETKEYASTE

SEQ ID NO: 28663 - protein, 96 aa, Methanococcus maripaludis S2
MVEFSHTKKIGSAGRFGSRYGRKIRVRLRDVEIKQNKDYKCPVCAFPKLKRAGTSIWVCEKCGAKIAGGAYTPETGAGKVVTKAIRRVIESKSREI

SEQ ID NO: 28664 - protein, 314 aa, Malus x domestica
ESESVCVTGASGFIGSWLVMRLLEHGYTVRATVRDPTNQKKVKHLLDLPKAETHLTLWKADLADEGSFDEAIQGCSGVFHVATPMDFESKDPENEVIKPTINGLLDILKACQKAKTVRKLVFTSSAGTVNVEEHQKPVYDESNWSDVEFCRSVKMTGWMYFVSKTLAEQAAWKYAKENNIDFITIIPTLVIGPFLMPSMPPSLITGLSPILRNESHYGIIKQGQYVHLDDLCLSHIYLYEHPKAEGRYICSSHDATIHELVKMLREKYPEYNIPTKFKGIDDNLEPVHFSSKKLREIGFEFKYSLEDMFVGAVD

SEQ ID NO: 28665 - protein, 402 aa, Burkholderia pseudomallei K96243
MTQMTAEQMARVKATAPVLAEHGATITKHFYQRMFGRHPELKNVFNQTHQKTGSQPETLAKAVYAYAANIDNLGALGGAVSRIAHKHASLNIRPEHYPIVGENLLASIVEVLGDAVDADTLEAWRIAYGQLAAILIGAEANLYENAAWSGFRPFKVAKKVRESDEITSFYLTPADGGAAPGFEPGQYISVKRFVGDMGVDQPRQYSLSDAPHGKWLRISVKREAGHSEAVPAGKVSTLMHDGVDVDSVVEVTAPMGDFTLNRHATTPVVLISGGVGITPMMSMASTLVAAGSEREVRFLHACRAANVHAFRDWLNDTTDAHPNVKRAVFYEVVGPNDRVGVDHDHEGRITPAALERHALVPDADYYICGPIAFMKQQRDALVALGVAPERVQTEIFGSGALE

SEQ ID NO: 28666 - protein, 758 aa, Desulfitobacterium hafniense Y51
MEFSRRNFLKTCAISAAMMTVGCTSQTKTIQVDPPEPAPSAPKQIDVDQWVKSVCRYCGTGCGVLIGVKDGKVAAVKGDPDNEGNKGLLCAKGYYLPQVITHSERVTKPLIRKNGKLEPCTWDEAMELVTAKFKESIANNGPDSVAFYGSGQQLAEEGYVANKLFKGAIGTNNIDGNPRLCMASAVGGFTTTFGADEPMGCLEDFEHANVFFIIGSNIAEAHPVLFGRLTDKKKKDPDTKIIIADPRRHRSHEIADISLQFVPGTDMALLHAMAYVIIEEGMADEEFIAKHTSFSNGKEAITFEAYKEFLKEFTPEKAEKVTGLPAAQIQEVARLFGEKGKNTMSMWTMGINQRVAGVWANNLIHNLHLLTGKICKPGSTPFSLTGQPSACGSVRETGALSHLLPGHRVIANEKHRKEVAELWGVPADRISPQAGLHTMELFKACGDGRVKCLYVMCTNPAHSLPNVNAYQEGFEKVFLVVAEAFHPTATTKYADVVLPAAFWCEKEGVYGNTDRRTQHLAKAINPPGEAKPDLDILLDLAQRLGYGELFPFKTPEDVWNEYLKCTTGTHMELATYPALREAHGIQWPVKDHQGNKGAVRRYVAPEDPYVKEGIDFYSAKDHKAVIFARPYLGPAEVVDEEYPYYLTTGRILEHWHTLTMTGKCPTLMRAVPKQYVELNPQDAAELGIKEGDTVRLVSRRGKVEIPVRVGKPGEPRPGLLFALWFEPDPLVNAVTIDAVDAASKEPEFKICAVKIEKV

SEQ ID NO: 28667 - protein, 262 aa, Ralstonia eutropha JMP134
MTMRDNMSTVTYEVRDRVAEILLDSPPVNALNEGMIDALLDALHRAAKDDAVRAVILGSAVPRRFCAGLQLDALHGASPQRAYQLVDKLYSGLNEAQFRLGKPSIAAVGGTARGGGMTLAIHCDMIVAADTATFGYPEIDVGVTPAIHYTHLPRIIGRHRAFDLLFTGRSFGADEAMSLGLVNRIVPEADVMCEARALAQTFCDKSPVVMRMGRTAFLRANDSDYRRGIATAVESFGNVFATDDAREGISAFVEKRKPYWQA

SEQ ID NO: 28668 - protein, 408 aa, Brucella melitensis
MATEIRVPTLGESVTEATIGKWFKKAGEAIAVDEPLVELETDKVTVEVPAPAAGVLAEITAKEGDTVEVGELLGQISSDGAAVAAAPAQKKEEAKPAAAAPAAAPVASASSGPAMQPAPAAAKLLAESGLSADQVEGSGKRGQVLKGDVLEAITKGVSAAPAAPVAARPASSADDASREERVKMTRLRQTIARRLKDAQNTAAMLTTFNEVDMSAVMELRNKYKDVFEKKHGVKLGFMGFFTKAVTHALKEIPAVNAEIDGTDIVYKNFCHVGMAVGTDKGLVVPVIRDADQMSIAEVEKELARLARAARDGSLSMADMQGGTFTITNGGVYGSLMSTPILNAPQSGILGMHKIQERPMVVGGQIVVRPMMYLALSYDHRIVDGKEAVTFLVRVKESLEDPERLVLDL

SEQ ID NO: 28669 - protein, 134 aa, Glycine max
  misc_feature (102)..(102): Xaa can be any naturally occurring amino acid
MAVPLLTKKVVKKRSAKFIRPQSDRRITVKESWRRPKGIDSRVRRKFKGVTLMPNVGYGSDKKTRHYLPNGFKKFVVHNTSDLELLMMHNRTYCAEIAHNVXSTKKRKAIVERASQLDIVVTNRLARLRSQEDE

SEQ ID NO: 28670 - protein, 565 aa, Gibberella zeae PH-1
MLRQFSAGLPKARASCSKVLGQASKFSMARRSMATVKVKGIEKDPTELDKVTTLPNGLRVASEALPGSFAGVGVYIEGGSRFENDSLRGVSHIMDRLAFKSTSKRSADDMLEQVEALGGNIQCASSRESMMYQAATFNNAVPQTIELLAETIRDPQITDLEVAEQIETARYEIREIWSKPELILPELVHTAAFKDNTLGNPLLCPEDRLGSIDKNTVMAYRDLFYRPERMVVAYAGIEHSEAVRLTEKFFGDMKKGARQITEATGSETSESELSDSEASASSASSSPQQSSGLLSRFFKNTPSAPQNLNNLPSQADIIRPSKYTGGFSWLPAQPPNLSGLPTFTHIHLAFEGLPVSSDDIYALATLQTLLGGGGSFSAGGPGKGMYSRLYTNVLNQHGWVESCMAFNHSYTDSGLFGISASCLPGRTAAMLDVMCQELRALTLTTGFSRLQETEVARAKNQLRSSLLMNLESRMVELEDLGRSIQVHGRKIPVKDMCRRIENLTVADLRRVATMIVGGQVKNPGGGSGAPTVVLQEAQAYGVSSHTMSWDQIQDRIDSWKLGSLS

SEQ ID NO: 28671 - protein, 423 aa, Anaplasma phagocytophilum HZ
MVTLPVVTKLKNNLSVITEHIGGVNSVGINLWVKVGSRHEVHEKIGLAHFLEHMAFKGTTTRSALDIAKTFDAIGGNFNAYTDKEHTVYHLKVMKKDARLALEVLTDIVLRSSFPEEEMEREKDVVLQEIYQTNDSPSSIIFDKYLEAAYEGQIFGKSILGSVHTVQNFSKEDLVSHMDKHYYGSNMVLSLAGDIVHDEVLEMAQGLEQLKDRQHCSPVQVPQYTGGEYLEERNHLEQVNIIIGFPGVPYGDERFHAMQVLDTILGSGLSSRLFQEVREKLGLVYSICSFNYSYSDSGLFSVHAATDSTKLPILLQTVTTELKKLPDTIEDEELQRAKSKLEAEILMSRESPVAKSEALGYYYSHYGRYIQKQELIEKIRSIDARNVQDVANFLLQSSSNITLAAIGKLDSSISRVEVASMLA

SEQ ID NO: 28672 - protein, 267 aa, Pseudomonas aeruginosa UCBPP-PA14
MAMDSSPGAVSPELVLLDRPEQGVALLRLNRPAVLNALNMRLREALAEYVRRLDECADTRVIVLTGNGTAFAAGADLNELAEASALEIQQRGVERHWQALAACRKPLIAAVEGHALGGGCELAMHCDLIVAGASARFAQPEIRVGVMPGAGGTQRLVRAVGKFQALRMLFTGCTVRAPEALAIGLVSEVAADGQALDRALELARQIAGLPPLALAQIKEVVLAGADLPLDQALALERKAFQLLFDSHDQKEGMRAFLEKRTAEYLGK

SEQ ID NO: 28673 - protein, 425 aa, Polaromonas sp. JS666
MSIHIIKMPDLGEGITEVELVAWRVKPGDRVTEDQVLADVMTDKATVEIPSPVVGQVLALGGEVGQVLAVGAELIRIEVEGAGAASEAAPSVLTVPQDATASMPVVPAPAPASTLTSIPTSIPDAIAPPSPSADKPIASPAVRRRAWELGIDLQQVAASGAGGRIMQADLDAHVAAHGTAPPAVAGSTGLAQRNDEEKVPVIGLRRRIAQKMQESKRRIPHFTYVEEVDVTELEALRARLNAKWGAQRGHLTLLPLLVRAVVLAVREFPQVNARFDDEAGVVTRHGAVHIGIATQTGAGLMVPVLRHAEARDLWSSAAEVVRLAEAARAGKATRDELTGATLTLTSLGALGGIVSTPVINHPEVAIVGVNRIVERPVMRDGAVVARQMMNLSSSFDHRVVDGVDAAGFVQAVRGYLESPVTLFVE

SEQ ID NO: 28674 - protein, 111 aa, Triticum aestivum
MARGAATQLVLVSMVAAMLLVACDAAISCGQVTSALSPCISYARGNGANPPAACCSGVRSLAGAARSTADKQAACKCIKSAAGGLNAGKAAGIPLKCGVSVPYAISSSVDC

SEQ ID NO: 28675 - protein, 865 aa, Anabaena variabilis ATCC 29413
MSNVDQVNYELADEVTALRQRIAELEQLEKQYQYKQVELERRIEDLQAKLRTPNIANVDIERHPEPVTLQRLQQEISQRQQVDAALTESEERWRLALDAANLGFWDWNVLTEKVVWSENHELLFGLVPGSFDGAYETFLCCVHPEDRESVMQVISACLNNKTDYYDEFRIVWPEKSIHWIAAKGRFFYNEQGQPVRMIGVCMDITESKRSEENTRQLATQVQEQANILNAILATSVDHIYILNRTGHYQYVSYGGAAVLGLHPQQMIGKTVQEIDLPQELIDKMNGQFLTVMKVGEPIKDECEYVAEDGKHYYEYILTPLRNVNHSIEGVITVSRDMTEHKRAEQSIRNSEARFRRLFESNLIGVAFWNVDGFITDANDAYLQIVGYTREEFDTLGKINWRELTPPDCEHLDTRAIAEVKANGISRIYEKQYIQRNGRRVSIVLGIALLDDSDEQGVAFVLDISERKLAEQQRDRLLCAERIARKDAEIANRIKDEFLAVLSHELRTPLNPILGWSKLLRSRQFDAATTDRALETIERNATLQTQLIEDLLDVSRILQGKLSLNVCPVSLPIVIGAAIDTVRLAAEAKEIKIQNVFDPELGQVMGDANRLQQVVWNLLSNAVKFTSPGGTVEIHLKAVNDQAQIQVIDTGKGITPEFLPYVFDYFRQADGTTTRKFGGLGLGLAIVRQVVELHGGTVQATSPGEGLGATFTVNLPLSPKHEAMNHEDKNPVSANFQPATLSGVRVLIVDDEPDIRDLVTFILEDYDVEVIAVSSAQEALEALSQSLPDIIVSDIGMPDVDGYMLMRQLRQRSPQEGGNLPAIALTAYAGEMNQQQALAAGFQLHISKPVDPDALIEAIGNLVNNQ

SEQ ID NO: 28676 - protein, 325 aa, Phalaenopsis hybrid cultivar
MESGSFPVINMELLQGSQRPAAMALLRDACENWGFFELLNHGISHELMNRVEAVNKEHYRRFREQRFKEFASKTLDSVENVDPDNLDWESTFFLRHLPTSNISQIPDLDDDCRATMKEFARELEKLAERLLDLLCEDLGLEKGYLKRVFCGGSDGLPTFGTKVSNYPPCPKPDLIKGLRAHTDAGGIILLFQDDKVSGLQLLKDGEWIDVPPLRYSIVVNIGDQLEVITNGKYKSVLHRVVAQTDGNRMSIASFYNPGSDAVIFPAPALVEKEAEEEEKKEIYPKFVFQDYMNLYIRKKFEAKEPRFEAMKSMEIVMSSQPIPTA

SEQ ID NO: 28677 - protein, 336 aa, Frankia sp. EAN1pec
MTAATSGAGGPATGAGAVAGPGFDRESTALEVARSADLRGRVAVLTGASSGIGVETARALAATGADVVLGVRDVAAGEELVREVRAGATGDIRAERLDLSDLGSVVAFAAQVTGPVDLLIANAGVSRTPESHLPNGLDVRFATNHLGHFLLALRLSEQLAERGARIVVVSSGAHRSIPVRLDDLQWTARRHNPGMAYAESKTANILFAQEATRRWGPDGIFANAVLPGSALTGLQRFHGDEMKRRIGFLNEDGSPNPVLKSPAQAAATTLWAATAPELAGRGGLVLEDCAEALPPGPPGSDVLVRSGFDPSVADPDTARRLWDRSIELLRVLGRPE

SEQ ID NO: 28678 - protein, 223 aa, Arabidopsis thaliana
MAMKSLSFLAVLSLLALTLPLAIASDPSQLQDFCVSANTSANGVFVNGKFCKDPKLVTADDFFFSGLQTARPITSPVGSTVTAVNVNNLLGLNTLGISLVRIDYAVNGQNPPHTHPRATEILVVEQGTLLVGFVTSNPDNRLFSKVLNEGDVFVFPEGLIHFQANIGKAPAVAFAALSSQNPGVITIANTVFGANPAINPTILAKAFQLNPRVVMDLQTKFKK

SEQ ID NO: 28679 - protein, 334 aa, Pseudomonas chlororaphis
MALSKEVPEFDIDDEVLLMETDIATDSMSNEGSAVPSVRAKSKHSASLKQHKYIDYTRALDATQLYLNEIGFSPLLSPEEEVHFARLSQSGDPAGRKRMIESNLRLVVKIARRYVNRGLSLLDLIEEGNLGLIRAVEKFDPERGFRFSTYATWWIRQTIERAIMNQTRTIRLPIHVVKELNVYLRAARELTQKLDHEPSPEEIANLLEKPVGEVKRMLGLNERVSSVDVSLGPDSDKTLLDTLTDDRPTDPCELLQDDDLSQSIDQWLSELTDKQREVVVRRFGLRGHESSTLEDVGLEIGLTRERVRQIQVEGLKRLREILEKNGLSSESLFQ

SEQ ID NO: 28680 - protein, 443 aa, Shewanella sp. MR-7
MKRTLSALVLAMGLFNPLSQAQATTAEDIKSFTLANGMKIMVLEDSSIPNANMYLFWKVGSRNEVPGITGISHFFEHMMFNGSKKYGPKMFDRTMEAAGGANNAYTTEDMTVYTDWFPANALETMFDLEADRIANLDINPDMVESERGVVQSERSTGLENSNWNTLEGEVKGVAFLAHPYSWSVIGHESDIAAWTLEDLVQYHKTYYAPNNAVVVIAGDVKLAQVKALADKYFAPIPAQTPPKAVRTVEPLQKGERRTFVQKASVSTPNVMLAYHVPAATHADYYALDLLSSILSQGNSSRLYQALVDKQVALEAETYMPMSVDPNLFYVMGVATPEVNANTLERALIEQINSIATNGVTQQELDKVKNIKLMDFYRAMETINGKANTIGTYEMYFGSYDKLFNAPEAYNKVTPADIQRVAQTYLRKSNRTVAVLAANEESDQ

SEQ ID NO: 28681 - protein, 113 aa, Xanthomonas campestris pv. vesicatoria str. 85-10
MSDKVQHVGDADFDTAVLQSGEPVLVDFWAEWCGPCKMIAPVLDDLADTYQGRLKVAKVNVDQNRALAIKYHVRSIPMLLLFKDGQVQATQIGAVGKGQLTQMIDKTLGGAAA

SEQ ID NO: 28682 - protein, 378 aa, Shewanella sp. MR-7
MFELIHETATGAMPKLTVFGVGGCGCNTINQLSQVNLPSSVELISVNTDAQAMAATSSHYRIQIGPQTTKGLGAGAKPDVGCAAAIESAQALTEQMQHSDIVFLTAGLGGGTGTGALPQVAKLARELTKPVIAVVTMPFSFEGQHRKTNAEAGLQELLESANAVIVLPNDKLAEVLGAKVTLLNAFKESNKILQDVLLGLANTISQAGLINIDLNDFISVISRQGRAAMGVSCLQGDEDLISAVKRAMQHPLLDNIELNQAQAAIVSVVAKDTIELSQYNQIGATVHEQLPRDALVIIGLTIDPNLESELEIMVIATGIGFTPPEIQDPIQAVNDNYINVHDFIKRQAISIAEPAPSKFDLENLQIPTYLRQQKPQAH

SEQ ID NO: 28683 - protein, 288 aa, Salinibacter ruber DSM 13855
MSILVDDDTRVVVQGLTGSEGTFHAEQMMDYGTNVVAGVTPGKGGQTHLGRPVYNTVAEAVEQENANTSIIFVPPPFAADAIQESADAGAEVIICITEGIPVADMKPTYQYVKKKGAHLIGPNCPGVITPGAAKVGIMPAMIFEPGSIGIISRSGTLTYEAVDQITRAGFGQSTAVGIGGDPVIGTRFIDALELFEDDPDTDGIVLIGEIGGTDEQEAARYVQDHMDTPVFGFIAGRTAPPGRRMGHAGAIVSGGSGTAEAKFQALEEAGATVVKNPALIGETVQDVL

SEQ ID NO: 28684 - protein, 593 aa, Paracoccus pantotrophus
MKMTTEEAFVKTLQLHGIEHAFGIIGSAMMPVSDLFPKAGITFWDCAHETNAGMMADGFTRSTGKMSMAIAQNGPGVTGFVTPVKTAYWNHTPLLLVTPQAANRTIGQGGFQEMEQMRIFADCVCYQEEVRDASRIPEVLNRVIMQAWRNSAPAQINIPRDFWTQVIDVELPQVVGFERPAGGEQAVTEAARLLSEAQFPVILSGAGVVLSGAIPDLVRLAERLDAPVCSNYQHNDSFPGSHPLAMGPLGYNGSKAAMEIIAKADVVLALGTRLNPFSTLPGYGIDYWPKEAKIIQVDINADRIGLTKKVTVGIQGDAAKVARGILAQLAPMAGDAGRAERKALVAQTKSRWAQELSSLDHEEDDPGTVWNADARKRDAGLMSPRQAWRAIMQAVPQEAIVSSDIGNNCAIGNAYPSFEAGRKYLAPGLFGPCGYGFPAILGAKIGNPDVPVIGFAGDGAFGISMNEMTACGRDDWPAITMVIFRNYQWGAEKRNTTLWYDNNFVGTELDRDTSYAKIAEACGLRGVQVKSQDELTAALHDAVERQMKNRETTFIEVLLNQELGEPFRRDAMKKPVVVAGIDPADMRPQQGAA

SEQ ID NO: 28685 - protein, 556 aa, Borrelia garinii PBi
MNTSLFQQERKKYVPKLPNILKKDFKNISLVYGEKTEAIQDRQALKEFFKNTYGLPIVSFTEGESSNLSFSKALNIGIILSGGPAPGGHNVISGIFDAIKKFNANSKLFGFKGGPLGLLENDKIELTESLVNSYRNTGGFDIVSSGRTKIETEEHYDKALLVAKENNLNAIVIIGGDDSNTNAAILAEYFKKKGENIQVIGVPKTIDADLKNNHIEISFGFDSATKIYSEMIGNLCRDAMSTKKYWHFVKLMGRSASHVALECALKTHPNICIVSEEVLAKKKTLFEIVDEMVFVILKRSLNGDNFGIVIVPEGVIEFIPEVKSLMVELCNIFDKNIVEFKGLNIEGMKEVFVAKLSDYMKKVYLSLPLFIQFELVNSILERDPHGNFNVSRVPTEKLFIEMVQARLSEMKKRGEYKGSFIPVDHFFGYEGRSAFPSNFDSDYCYSLGYNAAILILNGLTGYMSCIKNLNSKPTDWIAGGVPLTMLMNMEERYGVQKPVIKKALVDLEGRPFKEFVENRDKWAFNNLYLYPGPVQYFGSSEIVDEITETLKLELLK

SEQ ID NO: 28686 - protein, 727 aa, Rhodobacter sphaeroides 2.4.1
MPRSLIVHENFLSRVKARDLPQGAPPTPGLAPHEMVALFRNQCLSRALDRTSRAMQKAGQGFYTIGSSGHEGMAAVAHALRPSDMAFLHYRDAAFQIARAAQLGQSIAWDMLLSFASSAEDPISGGRHKVLGSKALAIPPQTSTIASHLPKAVGAAYSLGLARRRPPEHRALPEDALVMASFGDASANHSTAQGAFNTAGWTAFQSVPLPLLFVCEDNGIGISTRTPRGWIEASFRARPGLRYFRANGLDMSETYAVAAEAAAYVRNRRKPAFLHLGTVRLYGHAGADLPTTYMSREEVETEEANDPLLHSVRLMEAAGALDPDDALAIYLETQERVDRVAAEAVTRPRLKTASDVMASLIPPARPCAPTNGPSADSRAAAFGSDLKAMAEPQPMSRLINWALTDLMLAHPEIVLMGEDVGRKGGVYGVTQKLQTRFGPDRVIDTLLDEQSILGLGIGMAHNGFLPIPEIQFLAYLHNAEDQIRGEAATLPFFSNGQYTNPMVLRIAGLGYQKGFGGHFHNDNSIAVLRDIPGLILACPSDGAEAAMMLRECVRLAREEQRLVVFLEPIALYPMRDLAEEKDGGWMRTYPDPSERLRFGEIGCHGEGRDLAIVTFGNGIYLSQQANFTLRENGVAARILDLRWLAPLPLEAMLRATQDCRAVLVVDECRRSAGGPAEALMTALAEAGRTRIARITAEDSFIATGPAYAATLPSAAGIAEAALALVRA

SEQ ID NO: 28687 - protein, 218 aa, Vibrio cholerae O1 biovar eltor str. N16961
MNQSSLLAEFGDPITRVENALQALREGRGVLLLDDEDRENEGDIIYAVESLTTAQMALMIRECSGIVCLCLTEAQADRLALPPMVVNNNSANQTAFTVSIEAKHGVTTGVSAQDRVTTIKTAANPQAKPEDLARPGHVFPLRARAGGVLARRGHTEGTVDLMQMAGLQPAGVLCELTNPDGSMAKTPEIIEFGKLHNMPVLTIEDMVQYRIQFDLKLA

SEQ ID NO: 28688 - protein, 306 aa, Sinorhizobium meliloti
MTTIIDGKAVAASINGAIKDANAELQEQTGRKTGLSVIIVGDDPASHAYVGAKSRMAKECGFFSVQHTLPKETTQQELAGLVHQLNADDGIHGILVQLPLPEHLDADAIIQSIRPEKDVDGLHVANAGKLATGDLESGLISCTPAGAMVFVRRVHGRDLSGLNALVIGRSNLFGKPMAQLLLNANATVTIAHSRTSDLASICRNADIVIAAVGRPEMVKANWLKTGATVIDVGINRVPAPEKGENRTRLVGDVAFAECAPFASAITPVPGGVGPMTIAMLMANSVIAAHRASGLKVSERLSKLISG

SEQ ID NO: 28689 - protein, 333 aa, Deinococcus radiodurans
  misc_feature (309)..(309): Xaa can be any naturally occurring amino acid
MAKYRICLIEGDGIGHEVIPAAKRVLEAAGFDAEYVHAEAGYEYFLDHGTSVPEATYDAVENTDATLFGAATSPSGEKPAGFFGAIRHLRQKYNLYANVRPTKTRPVPHSYENVDLVIVRENTQGLYVEQERRYGDTAIADTVITREASDRIGKFAADLAMKRSKRLTVVHKSNVLPVTQGLFMNTILDHTKTVEGLSTSTMIVDNAAMQLVRNPQQFDVMVMTNMFGDILSDLAAGLVGGLGIAASGNVGDQFGIFESVHGSAPDIAGQGISNPTATILAAVIMLDHLGDHETARRLDNAINKVLAEXPRTRDLGGTAGTQEFTEAVIKALA

SEQ ID NO: 28690 - protein, 232 aa, Stephanomeria exigua subsp. coronaria
GGRYSVCSAVGVLPLSLQYGFPVVEKFLKGARSIDQQFLSAPFEKNIPVLLGLLSVWNVSFLEYPARAILPYTQALEKLAPHIQQVSMESNGKGVSIDGVRLPFEAGEIDFGEPGTKGQHSFYQLIHQGRVIPCDFIGIVKSQQPVYLKDEVVNNHDELMSNFFAQPDALAYGKTPEQLQSENVASHLIPHKTFTGNRPSLSLLLPSLDAYRIGQLLAIYEHRIAVEGFIWG

SEQ ID NO: 28691 - protein, 206 aa, Brassica napus
MPSRRRTLLKVIILGDSGVGKTSLMNQYVNKKFSNQYKATIGADFLTKEVHYEDRLFTLQIWDTAGQERFQSLGVAFYRGADCCVLVYDVNSAKSFEDLNNWREEFLIQASPSDPENFPFVVIGNKIDVDGGNSRVVSEKKARAWCASKGNIPYYETSAKEGTNVEDAFMCITKNAMKSGEEEEMYMPDTIDVGTSNPQRSTGCEC

SEQ ID NO: 28692 - protein, 265 aa, Magnetospirillum magnetotacticum MS-1
MPTTIFHENERTMASKRVPTSPYPDQKPGTSGLRKKVPVFRQPHYVQNFVQAIIDCIPDHRGATLVIGGDGRFFNKEVAQIALKIAAANGFGRVLVGRDGLLSTPAASCVIRKHKAVGGIVLSASHNPGGPQGDFGIKFNGSNGGPAPESVTTAIYERTKAIGEYRISDAPDLDLGQIGTTVIDGMTVEVIDPVADYAALMRERSFRRLSNWSPPLPMASCAWGTGPCRGLRGLGPRRLTGPAVGPPTYAVPPYILGTVGLRGQL

SEQ ID NO: 28693 - protein, 371 aa, Methanocaldococcus jannaschii
  misc_feature (45)..(45): Xaa can be any naturally occurring amino acid
MFISYWLLQNVFERHYIKKFLVLSMMKVCVIEGDGIGKEVIPEAXKILNELGEFEIIKGEAGLECLKKYGNALPEDTIEKAKEADIILFGAITSPKPGEVQNYKSPIITLRKMFHLYANVRPINNFGIGQLIGKIADYEFLNAKNIDIVIIRENTEDLYVGRERLENDTAIAERVITRKGSERIIRFAFEYAIKNNRKKVSCIHKANVLRITDGLFLEVFNEIKKHYNIEADDYLVDSTAMNLIKHPEKFDVIVTTNMFGDILSDEASALIGGLGLAPSANIGDDKALFEPVHGSAPDIAGKGIANPMASILSIAMLFDYIGEKEKGDLIREAVKYCLINKKVTPDLGGDLKTKDVGDEILNYIRKKLKGY

SEQ ID NO: 28694 - protein, 337 aa, Methanocaldococcus jannaschii
MVISMHKICVIEGDGIGKEVVPATIQVLEATGLPFEFVYAEAGDEVYKRTGKALPEETIETALDCDAVLFGAAGETAADVIVKLRHILDTYANIRPVKAYKGVKCLRPDIDYVIVRENTEGLYKGIEAEIDEGITIATRVITEKACERIFRFAFNLARERKKMGKEGKVTCAHKANVLKLTDGLFKKIFYKVAEEYDDIKAEDYYIDAMNMYIITKPQVFDVVVTSNLFGDILSDGAAGTVGGLGLAPSANIGDEHGLFEPVHGSAPDIAGKKIANPTATILSAVLMLRYLGEYEAADKVEKALEEVLALGLTTPDLGGNLNTFEMAEEVAKRVREE

SEQ ID NO: 28695 - protein, 344 aa, Pseudomonas syringae pv. syringae B728a
MTVSDSTMSETPHFPLAAVVGADDLKLALCLTAIDPRIGGVLIEGPRGMAKSTLARGLADVLASGQFVTLPLGATEERLVGTLDLDAALSEGRARFSPGVLAKADGGVLYVDEVNLLADHLVDLLLDVAASGVNLVERDGISHRHAARFVLIGTMNPEEGELRPQLLDRFGLNVALSGHTLPAERSQIIRRRLDFDSDPQGFCQHWQTQQDALKQRCEQARQLLSGIELDDQSLAMITERCFAAGVDGMRADLVWLRAARAHAAWRGAGHIEEQDIEAVAEFALRHRRREPLPPPQNSEAPPPPPGSSSKQAEPESGQGNWGELPAQAVTTGSRREVPSWPKKP

SEQ ID NO: 28696 - protein, 508 aa, Burkholderia cepacia
MSAVRESLSDQVPTVKLLIDGKFVDSNTTEWLDDVNPATQAVLSRVPMATAEEVNAAVAAAKRAFASWRHAPIGTRARIFLKYQQLIRENMGELAALLTAEQGKTRLDAEGDIFRGLEVVEHAAAIGNLQLGELANNVAKMVDTYTRLQPIGVCAGITPFNFPAMIPLWMFPMAIACGNTFVLKPSEQDPMVTMRLVELALEAGVPSGVLNVVHGGAQVVDAICDHPDIKAISFVGSTRVGTHVYNRATLAGKRVQCMMGAKNHAILMPDANREQSLNAIAGAAFGAAGQRCMALPVLVMVGEAQRWLPDLVAKAKALTVNAGDAAGADVGPLISPSACGRVRELIGEGVEAGAKLELDGRAVSVSGYEKGNFVGPTIFSGVKPGMSIYDIEIFGPVLCVIAADNLDEAIEIINANPSGNGTAIFTQSGAAARRFEEDIDVGQVGINVPIPVPVPMFSFTGSRASKLGDLGPYGKQVIMFYTQTKTITARWFDDASVRKNVNTTIALD

SEQ ID NO: 28697 - protein, 277 aa, Pseudomonas fluorescens Pf-5
MTFSEIAYEQSGPVVIIRFNRPEQRNCIGPVTHRELIEAWTRFREDENALVAIITGTGDRAFCAGGDLKAAAQLVPSSAEEMAAHDRGERPGIIGPSRWTEIYKPIIAAVNGVAYAGGLEWACFADIRIAEEHASFGVTCRRWNIGLADGGTQRLPRIIGMGRAMELILTGKVIDAQEAYRIGLVNEIVPSGRSLKRALELAHVLAGLPQPAMRSDKEAAVRGYGLPLAEGLKIEAQCFNRSIHQPETQEGLRRFIERDHPDRASQQSPGTPGIVRN

SEQ ID NO: 28698 - protein, 597 aa, Francisella tularensis subsp. holarctica
MSEKLQILRSLMQEKDYDFYIVPSVDDHNNEYVPKCWQYRAWISGFDGSAGDVLVCMDKAYLSTDGRYFLQAEQQLDKNDFELIKQSSFAPEIVKWLWKNTKGKTIAVDPAKLSYKSTLELLDYLNSNDYNVVFDQDNLVHKAQQMLSQVVDVPCTTIQEHAIQYSGRSVASKIEELRRTMKQTRSDFYVDSKLDHIAWLLNIRARDVECTPLVISYLFVSLDKIILYVDDRKITPAIKKYFDDNHIQTRDYYQFYQDLEATTGKYLLDGANINYKVPLSINKNQNSSCYFLMIDSPVGLSKALKNPVEINGSKEAHRKDAAAFISWWHWIENNYQGVDEIEAAAKLREFRAQQQGYVEDSFSYIVGHAANGAIIHYMAKKDANLKKIDDQAPLLCDSGGQYREGTTDITRVLHFGKPSKEHRKYYTLVLKGHLGLGRAVFPKGTTGSQLDVLAREHLWHFCADYAHGTGHGVGSFLGVHEGPQRINSVSKVELMPGMILSNEPGAYFPGEFGIRIENLCYIKQRNQESPTGHGPFYCFEDLTLVPYEYKLIETWMLTYTEKKTINNYYSRIRKEVLPLINDPQVREFLLFKTRHIK

SEQ ID NO: 28699 - protein, 440 aa, Pseudomonas aeruginosa UCBPP-PA14
MARLKRTLSLGSVVLFGIAYMTPIIVLGTFGILAETTQGHVPAAYIAASLAMLFTALSYGRMAAAFPVAGSAYTYVRKAIDSRLGFIAGWAVLLDYLFLPMAIWLIGAAYLHSAFPAVPNAVWVLAFIGVTTTINIVGLRLAKNVNGLLMLVQFLVLGAFVALCVHYVLGDPGKPLWSLQPLLGGDLQVPLVMSGAAIACYSFLGFDAVSTLTEETRDPRRNIPRAILLITLLGGLIFIVTSYFVQLAHPSFAFDSADSAAYEIARNIGGDLFVTFFLVGLIVGQFTSGLSAQASASRLLFAMGRDGVLPRPFFGRLGKRFETPVNSIVLCGVVALLALQMDVTTSTSFINFGAFLAFSLVNLSVVFHYYLGAERRGPRETLLFLVFPGIGLVADLWLMASLDHLAIILGLCWLALGAVYLAAITHGFREQPPEMRFEEG

SEQ ID NO: 28700 - protein, 286 aa, Zea mays
MATMSLRCLAMAMADTALPPAHKLLPTVSLPLLSSSTRAAPLLLFARRRLPLAPLVTSSDAVEAKSADEEEEKAGEPVEMEAGEFEEVLASGGEGEGQYAAVEPPEEAKVYVGNLPYDVDSEGLAQIFDQAGVVEVAEVIYNRETGQSRGFGFVTMSTVEEADKAIEMFSRYDISGRLLNVNRASSRGTRMERPQRQFAPAFRAYVGNLPWQVDDSRLVQLFSEHGEVVDAKVVYDRETGRSRGFGFVSMVSKEELNDAISALDGQELDGRPLRVNVAAERPQRGF

SEQ ID NO: 28701 - protein, 360 aa, Frankia sp. EAN1pec
MPQPDPRRPDPYRPDARQPGGLQPDVHRADGLPESVTIYEVGPRDGLQNEASVVDVAVKAEFVRRLAGAGLRAIETTSFVPAAWVPQLADAAELLELLGPPPRGARRPVLVPNTRGLERALAAGAGEIAVFGSATETFARRNLNRTVDESLAMFEPVVTAARARGLAVRGYLSMCFGDPWEGAVPPGQVAAIARRLVDLGVDELSLGDTIGVATPGHVEALLAELAAAGIGPGTLAVHFHDTYGQALANTLAALRAGVRTVDSSAGGLGGCPYARSATGNLGTEDLVWMLHGLGVGTGVDLGALVRTSVWMGERLGRPSPSRVVHALAARLAEDGLAEDGATADGCSEAGEGDGPCLTAG

SEQ ID NO: 28702 - protein, 211 aa, Ehrlichia ruminantium str. Gardel
MGIIVSENPSFISSIEDIIEDAKAGKVFVLIDDEQRENEGDLVVLAEKVTTDAINLMVTHGSGIVCLSITEDLMYKLGLELIPRRNINNNSASFATSIDARYGITTGVSVHDRVRTILTAVSKNVTMDDLVTPGHIFPIVSKKGGVLERLGHTEASVDIARIAGLTPAAVVCELMNPDGTMSRLSDIIEFSQRYDIKVTTIAKLVEYINTH

SEQ ID NO: 28703 - protein, 1032 aa, Avena sativa
MERARRLANRALLRRLLAGSASTTTPSPSRGISTLVPSPAAGSRPRRARPAHQHTPSRPVSVSALQPSDTFPRRHNSASPAEQTVMASTCGFNTLDSLIDATVPAAIRAPPMQFTGKFDAGFTESQMLEHMAHLASMNKVYKSFIGMGYYNTHIPAVILRNLMENPAWYTQYTPYQAEIAQGRLESLLNYQTMVADLTGLPMSNASLLDEATAAAEAMAMCNGILKAKKKTFLIASNCHPQTIDICQTRAAGFDLNVVVSDAKDFDYSSGDVCGVLVQYPGTEGEVLDYAEFVKDAHKHGVKVVMATDLLALTTLRPPGEIGADIAVGSAQRFGVPMGYGGPHAAFLATSQEYKRLMPGRIIGVSVDSSGKPALRMAMQTREQHIRRDKATSNICTAQALLANMAAMYAVYHGPAGLKAIADRVHGLAGTFAHGLKKLGTVTVQELPYFDTVKITCADANAIAEEARKNEMNLRVVDANTITVAFDETTTLEDVDKLFKVFSGGKPVDFTAESIAPEVSSSIPSSLVRDSPYLTHPIFSMYHTEHELLRYLHKLQTKDLSLCHSMIPLGSCTMKLNATVEMMPVTDPKFANMHPFAPIDQAAGYHEMFDNLGELLNTITGFDSFSLQPNAGASGEYAGLMVIRAYHRARGDHHRNVCIIPVSAHGTNPASAAMCGMKIITVGTDSKGNINIPELKKAAEANKDNLSALMVTYPSTHGVYEEGIDEICRIIHDNGGQVYMDGANMNAQVGLTSPGFIGADVCHLNLHKTFCIPHGGGGPGMGPIGVKKHLAPFLPSHPVIPTGGFPLPEKTDPLGSISAAPWGSALILPISYTYIAMMGSQGLTDASKIAILNANYMAKRLEKHYPVLFRGVNGTVAHEFIIDLRGFKATAGIEPEDVAKRLMDYGFHGPTMSWPVPGTLMIEPTESESKAELDRFCDALISIREEIAQVENGIADVNNNVLKGAPHPPQLLMSDAWTKPYSREYAAFPAAWLRGAKFWPTTCRVDNVYGDRNLICTLQQASQVAEEAAAATA

SEQ ID NO: 28704 - protein, 300 aa, Campylobacter jejuni subsp. jejuni NCTC 11168
MAYIKIKLSNNGKKAFQVLMENLKISINEAQKLIDKKRLFCDGILVEEKNKILNGLVELIVYENNPKGVEIVFENEDFAILEKESGILSHPNGRHCKYSLSDEIWHLWGKEACVAHRLDKETSGLILIAKNKKAQIDLKSLFEKKLVQKEYLALAHGKIEENFIVDKAINLTKNYDDVKTRMQICKEGKQAITEFEILEYFPKINATLLLCKPLTGRQHQIRVHLHYKNHTILGDPLYGLSKQQIESILDEKLNPKERLKLTGALRLCLHSYRLKFQYKNQNFDINSKINIKEIFNNSIK

SEQ ID NO: 28705 - protein, 116 aa, Oryza sativa
MARAQLVLVALVAALLLAAPHAAVAITCGQVNSAVGPCLTYARGGAGPSAACCSGVRSLFAAASTTADRRTACNCLKNAARGIKGLNAGNAASIPSKCGVSVPYTISASIDCSRVS

SEQ ID NO: 28706 - protein, 173 aa, Oryza sativa (japonica cultivar-group)
MAAAARSSTKGVRRTKSLISRTLERCKSGLSSGGGGRSAAAPVAGCFSVYVGPERERFVVRTEYANHPLFRRLLDDAEREYGYAAQGPLALPCAVDAFLDVLWQMERDGCGGGGDDDDDLSIGGGGAASPICGLPSCGSKGRAAAAGYRMLSPARMTSILSRSSPMATPSRKR

SEQ ID NO: 28707 - protein, 350 aa, Arabidopsis thaliana
MGVDYYNILKVNHNATEDDLKKAYKRLAMIWHPDKNPSTRRDEAEAKFKRISEAYDVLSDPQKRQIYDLYGEEGLKSGKIPNSSSSEASSSSSSSSSRYPHFHQHRPQHPPNASSFRFNPRDAEDIYAEFFGSENGGGSNNAGGRGNRAFRNGHFNTGGANGYSGEMRKVPAMENPLPVSLEDLYKGVVKKMRITRNVYDASGRMMVEAEILPIEIKPGWKKGTKLTFPKKGNEEPGIIPADIVFVVEEKPHPVYKRDGNDLLVSQEITLLEALTGKTVNLITLDGRTLMIPLTEIIKPDHEIVVPNEGMPISKEPGKKGNLKLKLSVKYPSRLTSDQKFELKRVLGGVS

SEQ ID NO: 28708 - protein, 134 aa, Brassica napus
MESYQNQSGAQLTHPQLDQYGNPVPIGTGAYGGAPVMAGHYTEGGGGLSGMLHRSGSSSSSSSSSEDDGLGGRRRKKGITAKIKEKLPGHHGSHQTSSATSTIPVYDATGTGAVHHEKKGIMEKIKEKLPGGHH

SEQ ID NO: 28709 - protein, 449 aa, Magnaporthe grisea 70-15
MQDSMTAAALPPLVQPLAEEVQQAQTIQQPDANGDAHQASGISADEIALYDRQIRLWGMQAQEKIRSANVLLVTVKALANEIAKNLVLAGINSLTIVDHEVVTAVDFGAQFLLSEDEGHLGMNRAEAASVNLRKLNPRVNVNVDKEDIRTRGPNYFQNFSVVIATDLDPDAFNIINLATRIVNKPFYAAGSHGFYGYIFADLIEHVFVIQRDEGNVATKLQPESRTRDVIDVQVKKEGGKSIERVTKRERYSTWTLSDVAPLPEEYRKSPRRLRAVTPVLSCLRALFEFQQEKGRLPALNRREDLERFTTLATERHHKLGLPVSTLKSEVLRSFLQNIGSELAPVTAIIGGQLAQDVINVLGASQAPIQNTLIFDGNTMEANMYPLHPEDDQLGSGQLVFSSPAGVQFAVDSSNAMAAGVVPDPSLMIPPVNMAGPDIAGPGPDMTLGQ

SEQ ID NO: 28710 - protein, 301 aa, Borrelia garinii PBi
MNTVFNGKDFANKYYLILKEFLKQHDLRDKIALKVVLANNEPASKLYVSIKNRVAKEIGLNVEVIKFSANSVQSDILEVIDRENKNLSTDGIIVQLPLLRHMDSNSILNSIVYSKDVDGLSFVNLGKMILGDKKGFIPCTALAVLKILLDEGIRTSGKTVVVVGRSPLVGKPISILLSSKPYDATVIVCHSKSIYLDVYLRQADIVISAVGKPKLIDKSMLCGEPYVIDIGISEIETDNGKILSGDTDFDNIKDCVKFITPVKGGIGPVTVLMLMFNTIKAHLINNNMFDILDRLEKLVEV

SEQ ID NO: 28711 - protein, 316 aa, Glycine max; identical to SEQ ID NO: 521

SEQ ID NO: 28712 - protein, 87 aa, Triticum aestivum
GNVTSPVAPCMSYARGQGSAPSGGCCSGVRPLNAKGSPPADRKGGCNCLKNLGGWGISMGNPPNIPGKWGVSVFFPINPKTNCTTLH

SEQ ID NO: 28713 - protein, 147 aa, Arabidopsis thaliana
  misc_feature (114)..(114): Xaa can be any naturally occurring amino acid
  misc_feature (124)..(124): Xaa can be any naturally occurring amino acid
  misc_feature (135)..(135): Xaa can be any naturally occurring amino acid
  misc_feature (139)..(139): Xaa can be any naturally occurring amino acid
MASSMFSSTAVVTSPAQATMVAPFTGLKSSASFPVTRKANNDITSITSNGGRVSCMKVWPPIGKKKFETLSYLPDLSDVELAKEVDYLLRNKWIPCVEFELEHGFVYREHGNTXPGYYDGRYWXMWKFHCRMTRXGQVXNEFKRPGA

SEQ ID NO: 28714 - protein, 593 aa, Paracoccus pantotrophus
  misc_feature (83)..(83): Xaa can be any naturally occurring amino acid
MKMTTEESFVKVLQLHGIEHAFGIIGSAMMPVSDLFPRAGITFWDCAHETNAGMMADGFTRSTGRMSMAIAQNGPGVTGFVTXVKTAYWNHTPLLLVTPQAANRTIGQGGFQEMEQMRIFADCVCYQEEVRDASRIPEVLNRVIMQAWRNSAPAQINIPRDFWTQVIDVELPQVVAFERPAGGEQAVAEAAKLLSGAEFPVILSGAGVVLSGAIPELARLAERLDAPVCSNYQHNDSFPGSHPLAMGPLGYNGSKAAMEIIARADVVLALGTRLNPFSTLPGYGIDYWPKDARIIQVDINADRIGLTKKVTVGIQGDAAKVARGILAQLAPTAGDAGRAERKALVAQTRSRWAQELSSLDHEEDDPGTEWNEDARRRDAGLMSPRQAWRAIMQAVPKEAIVSSDIGNNCAIGNAYPSFEAGRKYLAPGLFGPCGYGFPAILGAKIGNPDVPVIGFAGDGAFGISMNEMTACGREDWPAITMVIFRNYQWGAEKRNTTLWYDNNFVGTELDRDTSYAKIAQACGLVGVQVKSQEELTAALHDAVERQMKNRETTFIEVLLNQELGEPFRRDAMKKPVVVAGIDPADMRPQQGAA

SEQ ID NO: 28715 - protein, 409 aa, Xanthobacter autotrophicus Py2
MTTEIRVPTLGESVTEATIGKWFKKPGDTVKADEPLVELETDKVTVEVPAPAAGVLAEIVAKDGDTVGVGALLGSIGAGSGAAAAAPAAAAPAPAAAAPAPAPAPAAAPAASGSSVNGPAVGRIAAESGVDPSGVAGSGKDGRVTKGDMLAAVAAGAAAAPAAAPIAVRAPSAPIDAVREERVKMTKLRQTIARRLKDAQNTAAMLTTFNDVDMSAVMSLRAQFKDAFEKKHGTKLGFMGFFTKAVIAALKDLPAVNAEIDGQDLVYKNYYNIGIAVGTEKGLVVPVVRDADQLSVAEIEKAIAGFGRKARDGKLGIEDMQGGTFTITNGGIYGSLMSTPILNAPQSGILGMHRIEERPVAIKGQVVIRPMMYLALSYDHRIVDGREAVTFLVRVKETLEDPARLVLDL

SEQ ID NO: 28716 - protein, 151 aa, Stephanomeria exigua subsp. deanei
  misc_feature (128)..(128): Xaa can be any naturally occurring amino acid
HIQQVSMESNGKGVSIDGVRLPFEAGEIDFGEPGTNGQHSFYQLIHQGRVIPCDFIGIVKSQQPVYLKDEVVNNHDELMSNFFAQPDALAYGKTPEQLQSENVASHLVPHKTFTGNRPSLSLLLPSLXAYRIGQLLAIYEHRIAVEGFIWG

SEQ ID NO: 28717 - protein, 214 aa, Zea mays
  misc_feature (150)..(150): Xaa can be any naturally occurring amino acid
  misc_feature (186)..(186): Xaa can be any naturally occurring amino acid
  misc_feature (191)..(191): Xaa can be any naturally occurring amino acid
  misc_feature (194)..(194): Xaa can be any naturally occurring amino acid
  misc_feature (208)..(208): Xaa can be any naturally occurring amino acid
MDAADVWGRSSSSSSSSAAAARRLQARYDLYMGIDDADAGLDEVTEPRGGAESYNCPFCGEDFDFVGLCCHIDDEHAVEAKSGACPICATRVGMDLIGHLTMQHGSYFKMQRRRRVRKVSSGSHSLLSLLRKDLRNGSLQSFLGGSSYMXKPVERYVTSSLSFLLPHSSPSLPRYHWIWAEPSLSXEDQKXERXQRSKFVRGLVLSTXFDDDNL

SEQ ID NO: 28718 - protein, 264 aa, Candidatus Pelagibacter ubique HTCC1002
MFFNLFIIILFILFILFILSVIRIYQMAHLILVRHGQSEWNLEKRFTGWVDVDLTGQGKLEACKAGENIKETKIDIDYFYSSFQLRAINTLKFIQDTLRDKREPVKAWQLNERHYGALTGLNKDEMKEKLGEDKIHAFRRSWDIKPNPLSRNNPYHPLNIEVYKSIPKENIPDTESLKDTYDRVMKFYIDEIQMKLKNDKNILISAHGNSIRALCKFLFKLDNQRITLLEIPTGNPLLINLDSKQNIKECTYLNQDRAKDLLVF

SEQ ID NO: 28719 - protein, 147 aa, Oryza sativa
LHAPFPPYHNPTLILPPACLPKSRHIHRRPPPPRARLVRHEAASPPPSRRFKVQESMEDQTAAAAGLDSRVKASLVLGTESFAISSESGILSEQLAAMKEKSMEILKGYITKHNAPADVPDEPIEGLSDDEGDAPAKNPPKKPKKQK

SEQ ID NO: 28720 - protein, 232 aa, Stephanomeria exigua subsp. exigua
GGRYSVCSAVGVLPLSLQYGFPVVEKFLKGARSIDQQFLSAPFEKNIPVLLGLLSVWNVSFLEYPARAILPYTQALEKLAPHIQQVSMESNGKGVSIDGVRLPFEAGEIDFGEPGTNGQHSFYQLIHQGRVIPCDFIGIVKSQQPVYLKDEVVNNHDELMSNFFAQPDALAYGKTPEQLQSENVASHLVPHKTFTGNRPSLSLLLPALDAYRIGQLLAIYEHRIAVEGFIWG

SEQ ID NO: 28721 - protein, 430 aa, Kineococcus radiotolerans SRS30216
MTVQTQDADVLVVGAGPAGSTLARHLATAGHRVLVLEKSSFPREKVCGDGLTPRAVHELDLLGLKTPAEDGWARNRGLRLLGGGVRLQVPWPEISDYPGHGLVHTRSRFDQALAEHAREGGATVLERTSVTGPVLDERTGHVVGVTARPVDEKGRKAGEGTTYRAPVVVAADGVGGRLALSMGLAKREDRPLGIAVRTYFTSPRHDDDWMEAWMELREGDSSSGPLLPGYGWVFGVGDGTSNVGLGVLDPGAGSGDVDYRDLLRRWTAAMPPEWRFREEDQVGPIRGAALPMAFNRTPHYTRGLVLVGDAGGMVNPFNGEGIAYAMQSARFAARAVDEALSAPDARARERALQAYPAAVRADLGGYYTLGRVFVSLIGHPEVMRIATRFGLPRPGLMKLVVKLLANLADPTSKDATDRVVVALKRLAPAT

SEQ ID NO: 28722 - protein, 956 aa, Solanum tuberosum
ASIDAQLRQLVPAKVSEDDKLVEYDALLLDRFLDILQDLHGEDLKETVQECYELSAEYEAKHDPKKLEELGNVLTSLDPGDSIVIAKAFSHMLNLANLAEEVQIAYRRRQKLKKKGDFGDESNATTESDIEETFKKLVGDLKKSPQEVFDAIKNQTVDLVLTAHPTQSVRRSLLQKHGRIRDCLAQLYAKDITPDDKQELDEALQREIQAAFRTDEIRRTPPTPQDEMRAGMSYFHETIWKGVPKFLRRVDTALKNIGINERVPYNAPLIQFSSWMGGDRDGNPRVTPEVTRDVCLLARMMAANLYYSQIEDLMFELSMWRCNEELRVRADDLQRSSRRDEKHYIEFWKQVPPNEPYRVILGDVRDKLYQTRERARQLLGHGYSEIPEEATYTNIEQFLEPLELCYRSLCACGDLSIADGSLLDFLRQVSTFGLSLVRLDIRQESDRHTDVLDAITQHLEIGSYRDWSEERRQEWLLSELSGKRPLFGPDLPKTEEIADVLDTFHVIAELPADCFGAYIISMATAPSDVLAVELLQRECRVRQPLRVVPLFEKLADLDAAPAAVARLFSIEWYRNRINGKQEVMIGYSDSGKDAGRLSAAWQLYKAQEELIQVAKEFDVKLTMFHGRGGTVGRGGGPAHLAILSQPPETIHGSLRVTVQGEVIEQSFGEEHLCFRTLQRFTAATLEHGMHPPVSPKPEWRALMDEIAVVATEKYRSIVFKEPRFVEYFRLATPELEYGRMNIGSRPSKRKPSGGIESLRAIPWIFAWTQTRFHLPVWLGFGAAFKYAIEKDIKNLRMLQEMYNAWPFFRVTIDLVEMVFAKGDPGIAALFDKLLVSEDLWSFGELLRSKYEETKSLLLQIAGHKDLLEGDPYLKQRLRLRDSYITTLNVCQAYTLKRIRDPDYSVTPRPHISKEYMEAKPATELVNLNPTSEYAPGLEDTLILTMKGIAAGMQNTG

SEQ ID NO: 28723 - protein, 582 aa, Lycopersicon esculentum
MEILRKSSSLWALPILVLCFFINNGVFVDASHKVYMHLQSTTSHVDASKVHRTGYHFQPPKNWINDPNGPMYYNGVYHLFYQYNPKGATWGNIVWAHSVSKDLINWIPLEPAIYPSKVFDKYGTWSGSATILPGNKPVILYTGIVDANKTQVQNYAIPANMSDPYLRKWIKPDNNPLIVADKNINKIQFRDPTTAWMGRDGYWRVLVGSVRNHRGKVIMYKSNKNFMKWTKAKHPLHSAQGTGNWECPDFFPVSLKNENGLDTSYDGKDVKHVLKVSFDVTRFDHYTVGTYDTKKDKYFPDNTSIDGWKGLRLDYGNYYASKAFFDSGKNRRILLGWANESDTVDNDVKKGWAGVHPIPRKIWLDPSGKQLVQWPVQELETLRKKKVQLNNKKLNKGEKVEIKGITVAQADVEVIFSFASLDKAEPFDSSWADLYAQDVCAIKGSTVQGGLGPFGLLTLASKNLEEYTPVFFRVFKAHDNYKVLMCSDASRSSLKNETTMYKPSFAGYVDVDLADKKLSLRSLIDNSIVESFGAGGKTCITPRVYPTLAIFDKAHLFAFNNGAETITIETLNAWSMANAKLH

SEQ ID NO: 28724 - protein, 129 aa, Brassica napus
  misc_feature (87)..(87): Xaa can be any naturally occurring amino acid
  misc_feature (104)..(104): Xaa can be any naturally occurring amino acid
MIREIPSLQNDNVSIQDHTSSNIKNRNTMDMRRDNRQDMTFRGPTQDQMMSKQEYLQTLSSQNSTRRLITKSSYFSLESMVVLVGLXASLLFLPLILPPLPPPXPFMLLLVPIGIMVLLMVLALMPSSN

SEQ ID NO: 28725 - protein, 554 aa, Shewanella sp. MR-4
MCSIFSILDIQSDAKELRQVALEMSKLMRHRGPDWSGIYASDKAILAHERLAIVDIEHGAQPLLTEDGSLILAVNGEIYNHKELKAQLGDKYSYQTNSDCEVILALYQEYGTEFLDKLNGIFAFVLYDKAKDAYLIGRDHMGIIPLYTGRDAAGNFYVASEMKALMPVCKTVAEFQPGQYLYSSIGEPVQYYTRDWQSFDAVKDNGASQEELRDALEAAVKRQLMSDVPYGVLLSGGLDSSVISAITQTFAKRRIEDDDQSGAWWPQLHSFAVGLKGAPDLAAAKKVADAIGTIHHEINFTFQEGLDAIKEVIYHLETYDVTTIRAATPMYLMARKIKAMGIKMVLSGEGADELFGGYLYFHKAPNAQAFHEELVRKLDKLHLFDCLRANKAMAAWGLEARVPFLDKEFMDVAMRINPEAKMSKDGRIEKHILRQAFEHKLPKEVAWRQKEQFSDGVGYSWIDGLKAHAAEQVDDLQLANAKFRFPYNTPETKEAYFYRCFFEEHYPLASAAETVPGGKSVACSTPEALAWDESLRGIIDPSGRAVRSVHAASY

SEQ ID NO: 28726 - protein, 540 aa, Lycopersicon esculentum
VHRTRYHFQPPKNWINDPNAPMYYNGVYHLFYQYNPYGSVWGNIVWAHSVSTDLINWIPLEPAIYPSKVFDKYGTWSGSATILPDNKPIILYTGIVDAKNTQVQNYAIPADLSDPFLRKWIKPDNNPLIDADVNINKTQFRDPTTCWLGQDGHWRTLIGSLWGNKGMAILYKSRDLMKWTKVQQPLHSVDGTGNWECPDFFPVLLRGTNGLDASYKGENIKYVLKVSLDVTRFEYYTVGIYDTKKDKYIPDKTSIDGWKGLRLDYGNYYASKSFYDPSKNRRIVWGWANESDTVNDDVKKGWAGIQTIPRKIWLDSSGKQLVQWPVEELESLRGHKIQLSNRKLNKGDKIAVKGITPAQADVEVIFSFSSLDKAEPFDPNWANLYAQDVCAIKGSTVQGGLGPFGLLTLASKNLEEYTPVFFRVFKAHDKYKVLMCSDASRSTLENAKTMYKPSFAGYVDVDLTNKTLSLRSLIDHSVVESFGAGGKTCITSRVYPTLAIYDNAHLFVFNNGTETIKIESLNAWSMGKPKMNWSFGHSSY

SEQ ID NO: 28727 - protein, 646 aa, Arabidopsis thaliana
MISLTPSLFLNKTVVPGCSTRLSLRQPRTIITPPASLRVFSSLGSNQDPTGSVLIETTATSSSSLETSAADIVPKSTVSGGVQDVYGEDAATEDMPITPWSLSVASGYTLLRDPHHNKGLAFSHRERDAHYLRGLLPPTVISQDLQVKKIMHTLRQYQVPLQKYMAMMDLQETNERLFYKLLIDHVEELLPVIYTPTVGEACQKYGSIFLRPQGLFISLKEKGKIHEVLRNWPEKNIQVIVVTDGERILGLGDLGCQGMGIPVGKLSLYTALGGVRPSACLPVTIDVGTNNEKLLNDEFYIGLRQRRATGEEYSELMHEFMTAVKQNYGEKVVIQFEDFANHNAFDLLAKYGTTHLVFNDDIQGTASVVLAGLIAALRFVGGSLSDHRFLFLGAGEAGTGIAELIALEISKKSHIPLEEARKNIWLVDSKGLIVSSRKESIQHFKKPWAHDHEPIRELVDAVKAIKPTVLIGTSGVGQTFTQDVVETMAKLNEKPIILSLSNPTSQSECTAEEAYTWSQGRAIFASGSPFAPVEYEGKTFVPGQANNAYIFPGFGLGLIMSGTIRVHDDMLLAASEALAEELMEEHYEKGMIYPPFRNIRKISARIAAKVAAKAYELGLATRLPQPKELEQCAESSMYSPSYRSYR

SEQ ID NO: 28728 - protein, 343 aa, Mycobacterium avium subsp. paratuberculosis K-10
MRIGVLTGGGDCPGLNAVIRAVVRTCDSRYGSSVVGFQDGWRGLLENRRIQLHNDDRNDRLLAKGGTMLGTARVHPDKLRAGLNQIKQTLDDNGIDVLIPIGGEGTLTAAHWLSEENVPVVGVPKTIDNDIDCTDVTFGHDTALTVATDAIDRLHSTAESHQRVMLVEVMGRHAGWIALNAGLASGAHMTLIPEQPFDVEEVCRLVKRRFQRGDSHFICVVAEGAKPIPGSISLREGGIDEFGHERFTGVAAQLGAEVEKRINKEVRVTVLGHVQRGGTPTAYDRVLATRFGVNAADAAHAGEYGQMVSLRGQDIGRVPLADAVRQLKLVPESRYDDAAAFFG

SEQ ID NO: 28729 - protein, 257 aa, Pseudomonas syringae pv. syringae B728a
MLYETILIEIIGSVGLIRLNRPNALNALNARLINELNHALDQFEADSAIGCIVLTGSEKAFAAGADIKEMVDLSYPQIYLDDLFRDSDRVAARRKPLVAAVAGFALGGGCELALMCDFILAAENARFGQPEINLGVLPGMGGTQRLTRAVGKAKAMEMCLTGRLIDAHEAERAGLVARVLPLDQLLPEALAVAAVIASKSLPVAMMVKESVNRAFEVSLAEGIRFERRVFHAAFASQDQKEGMRAFIDKRQPDFKDC

SEQ ID NO: 28730 - protein, 434 aa, Geobacillus stearothermophilus
MAFEFKLPDIGEGIHEGEIVKWFVKPGDEVNEDDVLCEVQNDKAVVEIPSPVKGKVLEILVPEGTVATVGQTLITLDAPGYENMTFKGQEHEEVKKEEKAETVSKKEMVETAAPSAPAAEAEADPNRRVIAMPSVRKYAREKGVDIRLVQGTGKNGRILKEDIDAFLAGGAKAAAEPTPQAAEEKAAPQAPAAKPVVPEGEFPETREKMSGIRRAIAKAMVHSKHTAPHVTLMDEADVTKLVAHRKKFKAIAAEKGIKLTFLPYVVKALVSALREYPVLNTSIDDATEEIIHKHYYNIGIAADTDRGLLVPVIKHADRKPIFALAKEINELAEKAREGKLMPNEMKGASCTITNIGSAGGQWFTPVINHPEVAILGIGRIAEKPIVRDGEIVAAPMLALSLSFDHRMIDGATAQKALNHIKQLLSDPELLLMEA

SEQ ID NO: 28731 - protein, 249 aa, Anabaena variabilis ATCC 29413
MKPFLFVTDLDHTLVGNDAALAKLSQILTHHREEYGTKIVYATGRSPILYKELQVEKNLIEPDGLVLSVGTEIYLDGSSHPDSDWSEILTEGWNREIVLSVTKKFPELVLQPDSEQRPFKVSFFLHQEASFKVIPQLEAELEKYELNIKLIYSSGIDLDIVPLNSDKGQAMQFLRQKWEFAAERTVVCGDSGNDIALFAVGNERGIIVGNARPELLQWHSEYPADHRYLAKNFCAGGIIEGLQFFGFLE

SEQ ID NO: 28732 - protein, 260 aa, Triticum aestivum
HSRTSLYKKAGWYRSGIPGISSTHASGYAGDEEGKGGIYNFVTKRGRCKGRGSKISWTQVETGSAITWKYPSVELVGDDTVGEFYSVALTKDYQQADTGTKMIHKGKNSRSRIISKGISAGKSRNCYRGLVQMNSGAENAYNSSQCDSLLIGDNAAANTYPTIQVGCTSGRVEHEASTSKIGEDQLFYFQQRGIDHEKAVAAMIGGFCRAVFEHLPYEFAQEVDALMNLKPGRDQLAKFLVQQVCEISPDNYLKYHTMVI

SEQ ID NO: 28733 - protein, 431 aa, Leptospira interrogans serovar Copenhageni str. Fiocruz L1-130
METKIQNFGECSIPSPADYEYYTSDTSRLIFRTVFQSKEDWNSYVQEGPDFFEQAGPREKIYFNPQEVTAGIVTCGGLCPGINDVIRGIVMELYYRYGVSRILGFPYGYQGLVKRYSHQPIELTPEKVAHIVDEGGSMLSSSRGNQSPEEMVDSLSFYGVKILFCIGGDGTLRGARTIVDEIAKRKEKISVVGIPKTIDNDINYVQKTFGFSTAFSKAMEAVECAHVEAKGAPNGIGLVKLMGRHSGFIAVNAALASRNVNYCLIPEVDFDLFGNEAFLDDLKKRIQKKGHAVIIVAEGAGQKFFDSTEERDSSGNLKLKDIGLFLKDTMTEFFKKENIPVNIKYIDPSYIIRSIPANAEDSVFCGFLAQNAVHAGMAGKTDMVVGMWNNVFTHLPISVAIQERKVLQPDRSTLWRSLLASTGQPAHMLAK

SEQ ID NO: 28734 - protein, 273 aa, Frankia sp. EAN1pec
MADLQTSRPDGSLQDAPPGASDELVLTEHGRVLVLTMNRPAARNAMSLSLATAIAVALEQLDARDDLSIGIITGANKTFCAGMDLKGFARGERPIVPGRGFAGLVRQPPRKPLIAAVEGYALAGGFEIVLSCDLIVAARDAKFGLPEVKRGLAAAAGGLLRLQRRIPYHLAMELVLTGRMWPATEAAEVHLVNRLTEPGAALGVALELAEEISANAPLALAASKQVLSRSVDWPLEEAFERQEEYVAVVRTSADAKEGAVAFAEKRPPRWTGQ

SEQ ID NO: 28735 - protein, 192 aa, Glycine max
  misc_feature (150)..(150): Xaa can be any naturally occurring amino acid
  misc_feature (160)..(160): Xaa can be any naturally occurring amino acid
  misc_feature (171)..(172): Xaa can be any naturally occurring amino acid
ESSEEENDGVSGNHATKELIHLASNGAKFIDEVLNGQNECCLENFRMDKHVFYKLCDILQAKGLLRHTNRIKIEEQLGIFMFIIGHNLRTRAVQELFRYSGETISRHFNNVLNAIMSISLDLFQPPGSGVPSEIFEDPRFYPYFKECVGXVIDGIHVPVXLGVDEQGPFRXXNVLLSQNILAACSFDPQVSI

SEQ ID NO: 28736 - protein, 479 aa, Rubrivivax gelatinosus PM1
MVTEYRNYIDGEFLANRSGALIDVHNPATHELLARVPDAPNDVVDLAVQAARTAQPGWAKLPAIQRAQHLRAIAARLRENVEELAHTITAEQGKVLGLARVEVNFTADYMDYMAEWARRLEGEVLTSDRVGESIFLMRKPIGVAAGILPWNFPFFLIARKLAPALITGNTIVIKPSEITPINAFEFARLASQTDLPRGVFNLVGGTGAGAGAQLTSHRDVGIVSFTGSVETGTRIMTAASKNLTRVNLELGGKAPAIVLADADLDLAVKAIYDSRVINTGQVCNCAERVYVQRKVADEFTSKIAARMAGTLYGDPLAQPDVAMGPLVSQAGLDKVAGMVDRARAAGASIVQGGRKANRDKGYHYEPTVIANCSADMEIMRKEIFGPVLPIQVVDELDEAIALANDSDYGLTSSIFTKDLNSAMRAVRDLQFGETYVNREHFEAMQGFHAGRKKSGIGGADGKHGLYEFTETHVVYIQHG

SEQ ID NO: 28737 - protein, 192 aa, Zea mays
  misc_feature (153)..(153): Xaa can be any naturally occurring amino acid
VSGIPVEDCLVWDSRFLAPVPETALDVEVRAPAARRVAERKARKRSERRTYLVAAMMSNLGVTSMAVAAVYYRFSWQMEGGAVPVSEMFGTFALSVGEAVGMEFWARWAHRALWHASLWHMHESHHRPREGPFELNDVFAIVNAVSAISLLGXRREQIHHMDKFEGVPYGLFLGPKELEEVDGLDELEKELA

SEQ ID NO: 28738 - protein, 331 aa, Rubrivivax gelatinosus PM1
MKQAINEALDQEMTRDPSVIVLGEDIVGGAGGQGEMDAWGGVLGVTKGLYAKHGDRLMDTPLSESAYVGAAVGAAACGMRPVAELMFIDFMGVCFDQIFNQAAKFRYMFGGKAETPVVIRAMVGAGFRAAAQHSQMLTPLFTHIPGLKVVCPSTPYDTKGMLIQAIRDNDPVIFCEHKNLYGFEGEVPEASYAIPFGEANVVREGKHATIVTYGLMVHRSLDAAATLAKEGVEVEIVDLRSLSPIDMDTVLDSVTKTGRLICVDEASPRCNIGTDVSAQVAMQAFGALKAQIELVSPPHVPVPFSPTLEDLYIPSAAQVADAVRRTMKGKH

SEQ ID NO: 28739 - protein, 308 aa, Streptomyces avermitilis MA-4680
MADWNTSDIPDQRGRVVVVTGANSGLGYVTARELARKGARVVLACRSEARGAEAGDRLAAELPGAEVELGRLDLGDLGSVRDFAAWFPYERLDLLVNNAGVMALPYGTTADGFETQFGVNHLGHFALTGLLLPTLLGTPGARVVTVSSGMHALANIDIHDLNGERRYRRWIAYARSKTANLLFTHELTRRLAAHGSEVLAAAAHPGYAATNLQTAGVRMEGRRAAERIVELGNRVLAQPAEAGALPVLYAATAPEVRPDSFTGPSFAGWRGAPAPSWRAPWTLNDAMGERLWSASEQLTGVTYEALKV

SEQ ID NO: 28740 - protein, 366 aa, Xanthomonas campestris pv. campestris str. ATCC 33913
MLFETLDTTGHEQVIFCHNRDAGLKAIIALHSTRLGPALGGVRMRPYANSEAALNDALRLSRTMTYKNALAGLNVGGGKAVIIGDPKTDKSEALFRAFGRFVDTLGGRYITSEDVGTDVNDMEQIYLESEYVTGVHQVHRGSGDPAPFTAYGALQALMASLNRKLGHEEVGKASIAIQGLGHIGMELVKLLKERGAKLYVADLNPALVDRAVSEYGAEAVRPEEIHEVPADVFAPCALEGAINEDTLPRLKAKIICGTANNQLSSAAIGEELHKRGILYAPDYVVNAGGVMNVSLEIDGYNRERAMRLIRSIYHNLEKVFDLSTQLGIPPQQAADQIAETRIEAISKLKLPLGRTAPRFLHKLRGE

SEQ ID NO: 28741 - protein, 120 aa, Sedirea japonica
MARSTASMAVVCIVSFLLVSGVFREASGTITCGQVVSTLTPCISYIRGDSTLPQTCCSGVKKLNALASTSPDRQGACSCLKNLASHIPNLNPARAAGLPGNCGVSVPYPISTSTDCSKVR

SEQ ID NO: 28742 - protein, 296 aa, Rhodobacter sphaeroides 2.4.1
MTAKRIDGKAFAAGVRARVAEEVARLKEGHGIVPGLAVVLVGEDPASQVYVGAKGKQTVEVGMASFEHRLPAGTSEAELLALIDRLNHDPAVHGILVQLPLPAHLNADLVINALDPAKDVDGFHISNVGRLGTGQKSMVPCTPLGCLMMLRDHLGALSGLNAVVVGRSNIVGKPMAQLLLGESCTVTIAHSRTRDLAAVCRGADILVAAVGRPEMITGDFVKPGATVIDVGINRIERDGKTKLVGDVDYASAAEVAGAITPVPGGVGPMTIACLLANTLTACCRANGLPEPQGLTA

SEQ ID NO: 28743 - protein, 60 aa, Glycine max
METPNVTIPKVGPKPSRKVKLPTPKELISHYESKGMDSQDASMKVIEDLQTALIRVISSG

SEQ ID NO: 28744 - protein, 868 aa, Streptomyces avermitilis MA-4680
MSTTALVGTGHRPTIVLVGHGMVGQRFLEALAERGLTATHRVVVLCEEPRPAYDRVQLTSYFSGTTPDELSMTDAEFITEHGIDLRLGDPAETVDREARTVTARSGLVIAYDTLVLATGSYPFVPPVPGKDAEGCFVYRTIEDLLAIEAYAKSRATTGAVVGGGLLGLEAAGALKGLGLTSHIVEFAPRLMPVQVDAGGGAALLRTIEDMGLTVHTGTGTQEIVTGDDGAVTGMKLSDGSELATDLVVFSAGVRPRDQLARDCGLPVGERGGIAVDAQCRTEDPHVFAIGECALAADGRVYGLVAPGYEMAETAAATIASADSSFTGADLSTKLKLLGVDVASFGDAHGATAGCLDVVYADSRSGTYKKLVIGRDGELLGGILVGDADAYGTLRALTGSVPPVSPEQLVLPAGGGGGVALGPSALPDSAVICSCHNVTKGAIRGAVTEHSCTTLPEVKKCTKAGTGCGSCVKVLGQLVNDELTASGVEVDHGLCGCFTQTREELYEIVLALRITSYRSLLDRYGREGARGGDGCEVCKPTVGSIIASLAPTIGANGYVLDGEQSALQDTNDHFLANLQKNGSYSIVPRIPGGEITPEKLIVIGEVARDFGLYTKITGGQRIDLFGARVEQLPLIWTRLVDAGFESGHAYGKSLRTVKSCVGQSWCRYGVQDSVRMAIDLELRYRGLRSPHKLKSAVSGCARECAEAQSKDFGIIATANGWNLYVGGNGGATPRHADLLAQDLSDAELVRLIDRFLMFYIRTADRLERTSVWLERIPGGLDHIRDVVVHDSLGICEELESLMTAHVANYRDEWTETINDPEKLARFVSFVNAPDTPDPVVGFVPERDQIKPDLPLLTIGHRPLEGSAQR

SEQ ID NO: 28745 - protein, 415 aa, Xanthobacter autotrophicus Py2
MLAKSPSAILARSSRASVDASGAATGTVPARTAFLNDTTLRDGEQAPGVAFTRREKIEIAEALAAAGVPEIEAGTPAMGDEEIETLRSIVSLKLPLRVAAWCRMSEEDLFAAVSAGVTYVNLSIPTSDRQLKGKLNRDRDWALGALRHVVTLATKLGFTAAVGCEDASRADPDFLCKVAEVAKEAGAFRLRLADTLGVLDPFSAYALVRRVANATDLEIEFHAHDDLGLATANTLAAVTGGARHASVTVAGLGERAGNAALEEVAIALRQTARSETGIDPHALRPLAQKVMEAAGRPMPRTKAIVGEDIFTHESGIHVSGLLKDRGTYEALSPEMLGRSHRVVLGKHSGLAAILKALSDQGLAVDEARGRAILARVRDFAIRSKNSVSPDVLRRFYEDSFTEEALKRRHAAVMGA

SEQ ID NO: 28746 - protein, 409 aa, Roseovarius nubinhibens ISM
MVTPLADGVEETWSRLLDGQSGAGTITRFDPQNVVTKYACEVPMGDGSDGTFNADDYMEPKERRKVDDFILYGVAAADQAVRDANWMPEDEESRLRTGVMLGSGIGGLQSIEQTTLLIRDKGVRRVSPFFIPGALINLISGQVGIRYGFKGPNHSVVTACSTGAHAIGDAARLIMFGDADVMVAGGAEAAICEIGIAGFNACKALSTKRADDPKAASRPYDEDRDGFVMGEGAGVVVLEELEHAKARGAKIYAEILGYGLSGDAYHITAPSEDGDGGYRAMKMALGHAGIDPSEVDYINAHGTSTMADTIELKAVERLLGDAASKAAMSSTKSATGHLLGAAGAIEAIFSILAVRDQVVPPTINLDNPAVESPIDLVPNVKQERKVDVAMSNSFGFGGTNASLCIGKLR

SEQ ID NO: 28747 - protein, 575 aa, Oryza sativa
MAAAAALRCNPRPSAAVALRGAAAAPQVGNEAAFELLVGATEPCLRGRRRGAGIRCQRSAAASAVVVEKKSRAVEPAREGANAGHTESELTVVMKFGGSSVASAERMREVADLILSFPEERPVIVLSAMGKTTNKLLMAGEKAVGCGATNVSELDELTFIKELHFGTIDQLGLDRSIVSGLSDELEQLLKGIAMMKELTLRTRDYLVSFGECMSTRIFAALLNKLGVKARQYDAFEIGFITTDDFTNADILEATYPAIAKRLHGDWVTGPAIPIVTGFLGKGWKTGAITTLGRGGSDLTATTIGKALGLREIQVWKDVDGVLTCDPNIHPNAKPVPYLTFDEAAELAYFGAQVLHPQSMRPAREGDIPVRVKNSYNRRAPGTLITKARDMSKTVLTSIVLKSNITMLDIVSTRMLGQYGFLAKVFSIFEDLGISVDCVATSEVSISLTLDPSKLWSRELIKQANELDHVIEELEKIAVVHLLQHRSIISLIGNVQRSSLILEKAFNVLRTNGVNVQMISQGASKVNISLVVHDSEAKQCVQALHSAFFESGFLPEVNDILQDDSVAHSNGTVYRH

SEQ ID NO: 28748 - protein, 147 aa, Stephanomeria exigua subsp. macrocarpa
VSMESNGKGVSIDGVRLPFEAGEIDFGEPGTNGQHSFYQLIHQGRVIPCDFIGIVKSQQPVYLKDEVVNNHDELMSNFFAQPDALAYGKTPEQLQSENVASHLVPHKTFTGNRPSLSLLLPSLDAYRIGQLLAIYEHRIAVEGFIWG

SEQ ID NO: 28749 - protein, 376 aa, Zea mays
  misc_feature (92)..(92): Xaa can be any naturally occurring amino acid
  misc_feature (129)..(129): Xaa can be any naturally occurring amino acid
MAPTTATKDDSGYGDERRRELQAFDDTKLGVKGLVDSGVKSIPSIFHHPPEALSDIISPAPLPSSPPSGAAIPVVDLSVTRREDLVEQVRHXAAGTVGFFWLVNHGVAEELMGGMLRGVRQFNEGPVEXAKQALYSRDLARNLRFASNFDLFKAAAADWRDTLFCEVAPNPPPREELPEPLRNVMLEYGAAVTKLARFVFELLSESLGMPSDHLYEMECMQNLNVVCQYYPPCPEPHRTVGVKRHTDPGFFTILLQDGMGGLQVRLGNNGQSGGCWVDIAPRPGALMVNIGDLLQLVTNDRFRSVEHRVPANKSSDTARVSVASFFNTDVRRSERMYGPIPDPSKPPLYRSVRARDFIAKFNTIGLDGRALDHFRL

SEQ ID NO: 28750 - protein, 438 aa, Xanthomonas campestris pv. vesicatoria str. 85-10
MSTPQPAPDATGLVRVVSRWQIVGLSINDVIGSGIYLLPAATAALLGPMSLWAVMLAGLAVALLVLCYAQAGSYFDTPGGSYLYTREAFGPFVGFQIGWMIWLTRISSAAALSNGLADAVARFWPTASTDPWARLLVVVGSLGLLTAINVIGVKSAARTGIALVIGKLVPLLLFVAIGLFYVDWSWAFAGTAPDLRDLGNLGEAALLLLFAYAGFENIPAAAGEYRNPRRDVPFALITMIVTVTLIYAAVQVVAQGTLPNLAASPTPLADAASRFGGEALALILTVGATISILGTTSNTVMLGPRFLFALARDGYGPAFLARVHPRFHTPAAAVLTQGALSLALALSGSFTQLALLSMVTRLFAYIGTAAAVIVLARRYRQRTDTLRLPGGPAIPIAALVLSLGLLASASWQNLAAAGVALLVGWVFYLFPRKQVENG

SEQ ID NO: 28751 - protein, 448 aa, Salinibacter ruber DSM 13855
MPESSANQEELERTLGLVPALAIGTGTMVGAGIFVFPGLAAGRAGPAAMLSFAIGAVIALLVALPTSELATAMPESGGGYFFVSRALGTLLGCMVGVGQWLGLIFASAFYLIGFGHYLSDLARELGVTLPLPVVGLAFGMGILLTGVSVTGTENTGDLQNWIVGSLLAILAGFLGHGGLDALGVFGRQQTPEAFFPYGTMPVLTTAALVFTSYLGFVQIATVAGEIKAPSRNLPRSMIGSVLLVGTLYVLTIFISTSLLGSESLAEMGETAAVNVGRSIAGTFGAAALLGGGLLATLSSANASILSASRSIYALSRDELVPSQVERINRRYRTPHVALLLTGGIIVALILFGRVEVLAEVASLLHLFMYGLICVALLVLRQSPPSGYQPSFRCPGYPVVPVLGALTSFGLVAFMNPLSIAIGGGILLATAGWYLLYARAVTISEISSS

SEQ ID NO: 28752 - protein, 413 aa, Aspergillus fumigatus
MPLTPEQVQIIKATVPVLAEHGTTITTVFYKNMLTAHPELNNVFNTTHQVTGHQARALAGALFAYASNIDNLGALGPAVELMCHKHASLYIKPDDYKIVGKFLLEAMGQVLGDALTPEILDAWATAYWQLADIMIGREAQLYEQAEGWTDFRDFVVALKVPESSEITSFYLKPADGKPLPAFQPGQYISVQVHVPELNYLQARQYSLSDMPRSDYYRISVKKESGLNPAEPGAKAHPGHVSNILHASVNEGDTIKVSHPFGDFFLSDAKAAHPVVLLSAGVGLTPMTSILNTLTSQAPERKVSFIHGARNARARAFKNHITSLEQKLPNLKSTFFTSHPTEEDKEGDDYQFRGRVDLSQLDSNRDLFLDDATTEYYVCGPDTFMTDMLNVLKSKGVSEDRVKLELFGTGGVPH

SEQ ID NO: 28753 - protein, 406 aa, Bacteroides thetaiotaomicron VPI-5482
MHYNEYTLPNGLRIIHEPTLSKVAYCGFAIDAGTRDEAEDEQGMAHFVEHLIFKGTEKRKAWHILNRMENVGGDLNAYTNKEETVVYAAFLTGHLERALELLGDIVFHSTFPQHEIEKETEVIIDEIQSYEDNPSELIFDDFEDMIFRNHPLGRNILGKPELLRSFRTEDVLSFTRRFYQPGNMVFFVQGQYDFKKIIRLAEKHLSDIPAVTVDNQRMPPPLYVPERLVVPKDTHQAHVMIGSRGYNAYDDKRTALYLLNNVLGGPGMNSKLNVSLRERRGLVYNVESNLTSYTDTGAFCIYFGTDIEDMDICLKLTYKELKRMRDVKMTSSQLAAAKKQLIGQIGVASDNFENNALGMAKTYLHYHKYESSESVFHRIEALTAEQLLEVANEMFAEEYLSTLIYK

SEQ ID NO: 28754 - protein, 412 aa, Shewanella sp. MR-4
MSKRRVVVTGLGLVTPVGNTVDTTWKALLSGKSGIAPITKFDASEFTTRFSGSVKDFDVEQYLTKKDARKMDLFIQYGMAAGIQAIQDSGLDMSKVNPGRVGTAIGAGMGGMWLIEQNHSALLSGGPRKISPFFVPSTIINMIAGHLSIMYGMTGPNFAVTTACTTGVHNIGFAARTIAYGDADVMIAGGAEDVTCPLGVGGFGAAKALSTRNDDPTAASRPWDKDRDGFVIGDGAGVMVMEEYEHAKARGATIYGELVGFGMSGDAFHMTSPPSDGAGAAAAMVNAVNDAKLPFEKIGYINAHGTSTPAGDKAEAAAVKSVFGDHAYNLLVSSTKSMTGHLLGAAGAVEAIFTLLALRDQAVPPTINLDNPDEGCDLDFVAHTARDVKLEYALCNSFGFGGTNGSLLFKKV

SEQ ID NO: 28755 - protein, 569 aa, Anaplasma phagocytophilum HZ
MNLKLRDLRLAMREQGVEVLLLNHADEYQSGYVNENRQRVAWLCGFTGSNAFLIIRSEGKCIFFTDSRYSIQASLEVDQSCYDIYDMSDVTPAIWLKENLPLGTIIGYYGELFTLRQIQRFKRFCLKMLSCQMLDKLWDRPMEIRQRVVTHPVRFAGLESCDKRAILASKMQSCESMLITDVDSISWLLNIRNLDFAYNPAVLSRAILYKDERVDLFIEGADRVAIDGKGINVLEIDELPNVLKGLSNIAVDASTIPIYIFDMIKDRVSVIEDQDACTIFKAKKNAIEIDGMKEAHVRDGVAVVNFLYWLDCSIANNLRVTELDAVSKIREFRQQQDMFMGESFETISGFGGNGAIVHYRVDEKSNKVLEKDGIYLIDSGGQYSDGTTDITRTVAIGAPSVEQVARFTMVLKGFIAVANAAFPIGTTGAALDVLARQYLWQKQLNYGHSTGHGVGSFLSVHEGPQAISPINSVPLEPGMVLSNEPGYYEQDAYGIRIENLMYVVDCGRGFYRFRQLTCVPICLDMIDRSMLSREEIEYLNEYHSFVFEVIAPRVSEEVKQWLQVACRRI

SEQ ID NO: 28756 - protein, 463 aa, Yersinia pseudotuberculosis IP 32953
MAHDATVAVGTNQTGTNNRVQLRKTLTLVQVVMMGLAYLQPMTIFDTFGIVSGLTDGHVATSYAIALIAVLFTAVSYGKLVKRFPSAGSAYTYAQKSISPNVGFMVGWSSLLDYLFMPMINILLAKIYLEAIFPGVPSWIFVGALVSLMTLFNLRGINIVANLNSVIVVVQVAIMVVFMGLLIHGVYQGEGAGTLVSARPFYSENAHLVPMITGATILCFSFLGFDGISSLSEETPNAGKVIPKAIFLTALIGGIIFIAVSYCLQLYFPNISRFTDPEASQPEIMLFVAGKFFQSVILCFSCVTVLASGMAAHAGVSRLLYVMGRDGVFPEKVFGYVHPKWRTPAINVLLVGGVALSAISFDLVTATALINFGALVAFTFVNLSVIAQFYVRERRNSTFKDHFNYLILPMIGAGTVGVLWVNLESSSMTLGLVWGAIGLSYMVWKTRAFRRALPQFTEEPAQL

SEQ ID NO: 28757 - protein, 313 aa, Enterobacter asburiae
MLDNVLRIATRQSPLALWQAHYVKQRLEACHSGLRVELVPMVTRGDVILDTPLAKVGGKGLFVKELELALLENRADIAVHSMKDVPVEFPEGLGLVTICEREDPRDAFVSNHYDSLDALPKGSVVGTSSLRRQCQLAERRPDLIIRSLRGNVGTRLGKLDNGDYDAIILAVAGLKRLGLESRIRVALPPELSLPAVGQGAVGIECRLDDARTRELLAPLNHDETAIRVKAERAMNTRLEGGCQVPIGSYAELTEGELWLRALVGAPDGSQMVRGERRGKAQDAEQLGVSLAEELLDNGAREILADVYNGEPPA

SEQ ID NO: 28758 - protein, 180 aa, Bacteroides thetaiotaomicron VPI-5482
MKSFILMVITMVCAISLEAQNKSFYDFNVTTIDGKEFPLSSLKGKKVLVVNVASKCGLTPQYAKLQELYDKYKDKNFVIIGFPANNFMGQEPGSNEEIAQFCSLKYDVTFPMMAKISVKGKNMSPLYQWLTEKKLNGKEDAPVQWNFQKFMIDENGNWVGFVAPKESPLSEKIVTWIEQE

SEQ ID NO: 28759 - protein, 343 aa, Thiobacillus denitrificans ATCC 25259
MSDPLESWHEEKRSAWLYRVVAECEQGTPRAALFGELAQAADDQAEIWLRVLAADGAPPPAPFRPDLRTRVVASLTRLFTPRAMHGVLAAMKVRGMSLYTQHAPHATPSKRDDIGKRHRTGAAGNALRAGVFGVNDGLVSNAALIYGVAGAAQASEVILLTGVAGLLAGAFSMAAGEYVSMRSQREMFEYQIGLERDELEKYPAEEAAELALIYAAKGMPEGEAKRVADTLMENPERALDTLAREELGLNPDELGSPWTAALASFAAFSVGAAVPLLPFLLGAGNSLALSVAFTALGLFAVGASMSLFTGRRAPLSGLRMLAIGGGAGLATYFIGAWLGVTLG

SEQ ID NO: 28760 - protein, 497 aa, Yarrowia lipolytica CLIB122
MSAKSIHEADGKALLAHFLSKAPVWAEQQPINTFEMGTPKLASLTFEDGVAPEQIFAAAEKTYPWLLESGAKFVAKPDQLIKRRGKAGLLVLNKSWEECKPWIAERAAKPINVEGIDGVLRTFLVEPFVPHDQKHEYYINIHSVREGDWILFYHEGGVDVGDVDAKAAKILIPVDIENEYPSNATLTKELLAHVPEDQHQTLLDFINRLYAVYVDLQFTYLEINPLVVIPTAQGVEVHYLDLAGKLDQTAEFECGPKWAAARSPAALGQVVTIDAGSTKVSIDAGPAMVFPAPFGRELSKEEAYIAELDSKTGASLKLTVLNAKGRIWTLVAGGGASVVYADAIASAGFADELANYGEYSGAPNETQTYEYAKTVLDLMTRGDAHPEGKVLFIGGGIANFTQVGSTFKGIIRAFRDYQSSLHNHKVKIYVRRGGPNWQEGLRLIKSAGDELNLPMEIYGPDMHVSGIVPLALLGKRPKNVKPFGTGPSTEASTPLGV

SEQ ID NO: 28761 - protein, 303 aa, Bacillus subtilis subsp. subtilis str. 168
MIYTVTLNPSVDYIVHVEDFTVGGLNRSSYDTKYPGGKGINVSRLLKRHHVASKALGFVGGFTGEYIKTFLREENLETAFSEVKGDTRINVKLKTGDETEINGQGPTISDEDFKAFLEQFQSLQEGDIVVLAGSIPSSLPHDTYEKIAEACKQQNARVVLDISGEALLKATEMKPFLMKPNHHELGEMFGTAITSVEEAVPYGKKLVEQGAEHVIVSMAGDGALLFTNEAVYFANVPKGKLVNSVGAGDSVVAGFLAGISKQLPLEEAFRLGVTSGSATAFSEELGTEEFVQQLLPEVKVTRL

SEQ ID NO: 28762 - protein, 498 aa, Bradyrhizobium sp. BTAi1
MRSIGHFIGGKEVKGTSGRTADVFEPMTGDVQAKVALASRAELRAAVENAKAAQPAWAATNPQRRARVMMKFLELAQRDYDQLAELLAREHGKTVPDAKGDIQRGLEVVEFACGIPHLMKGEYTEGAGPGIDIYSMRQPLGVVAGITPFNFPAMIPMWKFAPAIACGNAFILKPSERDPGVPMKLAELMIEAGLPAGILNVVNGDKEAVDAILEDPDIMAVGFVGSSPIAQYIYERAAAHGKRCQCFGGAKNHAIVMPDADLDQAVDALIGAGYGSAGERCMAVSVAVPVGKTTADRLMEKLIPRVESLKIGTSIDPSADYGPLVTREAVERVKNYVDIGVKEGATLAVDGRGFKMQGYENGFYMGGCLFDNVTKDMRIYKEEIFGPVLSVVRAKDYAEALALPSEHDYGNGVAIFTRDGDAARDFAAKVNVGMVGINVPIPVPIAYYTFGGWKKSGFGDLNQHGPDSIRFYTKTKTVTSRWPSGVKEGAEFSIPLMK

SEQ ID NO: 28763 - protein, 112 aa, Thiobacillus denitrificans ATCC 25259
MKFVTAIIKPFKLDEVREALSAIGVTGLTVTEVKGFGRQKGHTELYRGAEYVVDFLPKVKLEVAIKADLLERVIEAIEHAANTGKIGDGKIFVSSLEQVVRIRTGESGPDAL

SEQ ID NO: 28764 - protein, 376 aa, Xanthomonas campestris pv. campestris str. ATCC 33913
MNFAPVPELIEELRAGRMVVIVDDEDRENEGDLIMAAELVKPSDINFMVTHARGLVCLSLTRERCTQLGLAPMVRNNTAQFHTNFTVSIEAAEGVTTGISAYDRAHTVRTAVRPDAKPHDLSQPGHIFPLIAQPGGVLTRAGHTEAASDLPMLAGLEPAGVLVEVLNPDGSMARRPQLEVFAREHGLKMGSIADLIAYRLANEHTVERVDEREIETEFGPFHLVTYRDRIAHDLHFALVRGTPDPTTPTLVRVQVENPLADLLHWQRDDFGVAATDALRAIAAEGQGVMVVLSAPRDSESLLARLRQQPEVAANAKDVSQWRRNGAGAQILADLGLGKLRVLGTPRRQVGLAGFGLEVVEFLECHPGAASRVAAAP

SEQ ID NO: 28765 - protein, 293 aa, Glycine max
  misc_feature (6)..(6): Xaa can be any naturally occurring amino acid
  misc_feature (39)..(39): Xaa can be any naturally occurring amino acid
AKPPTXGAVSALHMVHCFHLAGFPKGLINCVTGKGSEIXFTGGDTGISISKKAGMIPLQMELGGKDACIVLEDADLDLVAANIIKGGFSYSGQRCTAVKVVLVMESVADALVEKVKAKVAKLTVGPPEDDCDITPVVSESSANFIEGLVLDAKEKGATFCQEYKREGNLIWPLLLDNVRPDMRIAWEEPFGPVLPVIRINSVEEGIHHCNASNFGLQGCVFTKDVNKAIMISDAMETGTVQINSAPARGPDHFPFQGIKDSGIGSQGITNSINMMTKVKTTVINLPSPSYTMG

SEQ ID NO: 28766 - protein, 189 aa, Cucumis sativus
MASSILSSAAVASVNSASPAQASMVAPFTGLKSSAGFPITRKNNVDITTLASNAGKVQCMKVWPPLGLRKFETLSYLPDMSNEQLSKECDYLLRNGWVPCVEFDIGSGFVYRENHRSPGFYDGRYWTMWKLPMFGCTDSSQVIQEIEEAKKEYPDAFIRVIGFDNVRQVQCISFIAYKPQVLLFLSSIC

SEQ ID NO: 28767 - protein, 502 aa, Desulfovibrio vulgaris subsp. vulgaris str. Hildenborough
MSEQFELEKTLSPMQVWALALGSIVGWGCFVLPGDMFLPQAGPVGTLTGFLIGAFLLSFVAVCYSYMVKYVPVAGGAFAYAYVGFGPTAAFICGWALVLGYIAIVCIDIAALALIFRFLFPGVFEFGPLYSIAGWQVYTGEVMLMTFGTLAFGWMNYRGVSFAGKLQVVLAYMLTIGIVALFAGTASLESAHMSNLMPMFAEHRTPLSCVLIIFAISPFLFVGFDTVPQAAEEFAFDPARSRRIMILAIFMGVILYSLVALSVAIVMPYPEMLAKMEALRASGGTAWATGDAATMAFGKFGAIVLACAVLGAVCTGINGFYIATSRLLLSMARGRILPSWFGDIHPKYRTPYKAILFTIAIVLLTPFAGRSVVVWIVDMSSVGTGIGYLFTCLAARRVLLGTPGVGNKSLSILCCNIGTLTSVMCIVLLLVPGSPAYISEASRWCMVAWVVMGFFFYYSNKSVWAQLPEMTIRSSILGSCDIPVFFKGNTSGVKAAAEAASK

SEQ ID NO: 28768 - protein, 241 aa, Cupriavidus necator
MHATEPNTGHGSQRAIRLAPSILSADFARLGEEVCAIEAGGADLVHFDVMDNHYVPNLTIGPLVCEAIRPLVSIPIDVHLMVEPVDALIPMFAKAGANLISFHPEASRHVDRTIGLIRDHGCKAGLVLNPATPLSWLDHTLDKLDLVLLMSVNPGFGGQAFIPGVLDKVRQARARIDRQVAAGGRPVWLEIDGGVKADNITEIARAGADTFVAGSAVFGAPDADGGYRGILHRLREAATIT

SEQ ID NO: 28769 - protein, 421 aa, Streptomyces avermitilis MA-4680
MVDADQTFVIVGGGLAGAKAAETLRAEGFTGRVILICDERDHPYERPPLSKGYLLGKEERDSVFVHEPAWYARNDIELHLGQTVDAVDRAAKTVRFGDDGTLVHYDKLLLATGAEPRRLDIPGTDLAGVHHLRRLAHAERLKGVLAALGRDNGHLVIAGAGWIGLEVAAAAREYGAEVTVVEHGPTPLHGVLGPELGQVFAELHREHGVRFHFGVRLTEIVGQDGMVLAARTDDGEEHPAHDVLAAIGAAPRTGLAEAAGLTLADRAHGGGIAVDGRLRTSDPDIYAAGDVAAFHHPLFDTRLRVEHWANALNGGPAAARAMLGRDLTYDRMPYFFSDQYDLGMEYSGWAPPGTYDQVVIRGDAGKRQFIAFWVKEGRVLAGMNVNVWDVTEPIQALIRSGTPVDTEALANPHVPLETLTP

SEQ ID NO: 28770 - protein, 338 aa, Pseudomonas putida
  misc_feature (5)..(5): Xaa can be any naturally occurring amino acid
  misc_feature (7)..(7): Xaa can be any naturally occurring amino acid
  misc_feature (15)..(15): Xaa can be any naturally occurring amino acid
  misc_feature (18)..(18): Xaa can be any naturally occurring amino acid
  misc_feature (71)..(71): Xaa can be any naturally occurring amino acid
  misc_feature (99)..(99): Xaa can be any naturally occurring amino acid
  misc_feature (118)..(118): Xaa can be any naturally occurring amino acid
  misc_feature (137)..(137): Xaa can be any naturally occurring amino acid
  misc_feature (148)..(148): Xaa can be any naturally occurring amino acid
  misc_feature (336)..(336): Xaa can be any naturally occurring amino acid
ATTTXTXIQALRSAXDVXLERDDNVVVYGQDVGYFGGVFRCTEGLQTKYGKSRVFDAPISESGIVGTAVGXGAYGLRPVVEIQFADYFYPASDQIVSEXARLRYRSAGEFIAPLTLRXPCGGGIYGGQTHSQSPEAXFTQVCGLRTVXPSNPYDAKGLLIASIECDDPVIFLEPKRLYNGPFDGHHDRPVTPWSKHPHSAVPDGYYTVPLDKAAITRPGNDVSVLTYGTTVYVAQVAAEESGVDAEVIDLRSLWPLDLDTIVESVKKTGRCVVVHEATRTCGFGAELVSLVQEHCFHHLEAPIERVTGWDTPYPHAQEWAYFPGPSRVGAALKKVXEV

SEQ ID NO: 28771 - protein, 335 aa, Borrelia garinii PBi
MKLAINGFGRIGRNVFKIAFERGIDVVAINDLTDPKTLAHLLKYDSTFGVYNKKVESRDGAIVVDGREIKIIAERDPKNLPWAKLGIDVVIESTGVFSSATSDKGGYLDHVNHAGAKKVILTVPAKDEIKTIVLGVNDQDINSDLKAVSNASCTTNCLAPLAKVLHESFGIEHGLMTTVHAYTNDQRILDLPHSDLRRARAAALSIIPTSTGAAKAVGLVLPELKGKLNGTSMRVPVPTGSIVDLTVQLKKKDVTKEEINFALKKASETPELKGILGYTEDPIVSSDIKGNSHSSIVDGLETMVLENGFAKVLSWYDNEFGYSTRVVDLAQKLVK

SEQ ID NO: 28772 - protein, 236 aa, Lotus japonicus
MLCTRILFFSRTIRFAAPLSSSSLHSFVFSNSPITLSRSYHSSLLTTTSFPIKSLVSTSTTPFSFTLRPDHTMAAPTSVYDFTVKDARGNDVNLGDYKGKVLLIVNVASQCGLTNSNYTELSQLYEKYKSKGLEILGFPCNQFGAQEPGDNEQIQEFVCTRFKAEFPVFDKVDVNGDSAAPLYKYLKSSKGGLFGDKIKWNFSKFLVDKEGNVVERYAPTTSPLSIEKDLVKLLGA

SEQ ID NO: 28773 - protein, 1150 aa, Gibberella zeae PH-1
MGTRTASSAVADASLRGPGRTHSTRSSRSSRVPSFPPPSPSASAAPAAPAPATSTGTGANYNQSHTRQLSHSHSQSQSRSQSQSLSQAQSQAYASRSHSHSHSHSHSRSASNAANSHPPPHHSQHQRTSSSARTTSQNDHESSRLAANPKHHRTSSKDDRHPPPTRGPDPSRAHRRSSSSRSKNNNHNPPPEMAPSASAPSNGTSHASAAPPTNHADAPPRASTSKHARSRTVIPTQSGKWMLGKTIGAGSMGKVKLARKEDGSEQVACKIIPRGSTDDGHQSRADKERADQSKEIRTAREAAISTLLNHPHICALHDVVRTNHHWYMLFEYVNGGQMLDYIISHGKLKEKQARKFSRQIASALDYLHRNSIVHRDLKIENILISKTGDIKIIDFGLSNLFAPRGHLKTFCGSLYFAAPELLQARAYTGPEVDVWSFGIVLYVLVCGKVPFDDQSMPALHAKIKRGLVDYPAWLSSECKHLLSRMLVTDPKQRATMQEVLTHPWMAKGFNGPPDNYLPNREPLTTPLEPEVILAMQGFNFGTPESINAQLTKIIESDEYQRAIKLYQREKELPQPTKDAEKKRAFGFDFYKRRNSGNSRDTLSAPSSEALQMGNDPMNAFSPLLSVYYLVKEKQDRDHADMVPPAASQSREKEKEKEREREREREEKREREREREKEREREREREREAREKEKAREPELPEIAAPQAAHTNSSAYEMPGEKPTGGRSRPRARTHGEDDMPELPKQTPAPPPEPRVEQIQKKEGTAAGILRRFSTRKRREPERLDRDRSHPPVVQVHSPAEPSPLAPRKSFSIRRGRRDREDASDTQIRSSSNQGQHGELLSPPMSSGGNREGRRGSALGRSTSVNSAEMRRRKDHPATNESDQSVGNEESSSSRRAHGHSRSVSLRAKSIGHARRESIQQRRQRRDAAQEANVPEETDQELEQSGVSTERLDDTELSKPVFLKGLFSVSTTSGKSVPAIRTDIKRVLKQLNVDYTEIKGGFRCRHSPSIDLNKVQDPPMSPGNTPGHKRRFSFGGLIRGDDRDRDDFRDSDRPPTTPRTPGRSDRDRSFSNSETSFDSNSGRNAGPSRQVPGETSTQVQSDLGGSMVLEFEIFIVKVPLLSLHGIQFKRMAGNTWQYKSMADHILRELRL

SEQ ID NO: 28774 - protein, 479 aa, Sphingomonas sp. tfd44
MTYPDTRLFIGGRWQDAADGRSLAVQNPATGLEIGRVAHCGRADLDRALDAAQRGFEIWRDLTPAERSKIMRRAAGLMRERADEIARLLTQEQGKPLHEAKIEAMAAGDIIEWFAEEGFRLYGRLVPHRTDIAIRQMVIKDAVGPVAAFTPWNFPINQVVRKISAALAAGCSMIVKAPEETPASPAELIRAFQDAGLPDGVLNLVFGDPAEISNYLISSPIIRKITFTGSTPVGKLLASLAGKHMKRVSMELGGHAPAIVCEDADIGLAVKSLSASKFRNAGQVCIAPTRFLVHSSIKHAFADALAAAARDLRVGDGFADGTQIGPLANSRRLAAMAEFQQDAIEKGATLLTGGNRVGDVGNFWAPTVLSDVPLEARLFNDEPFGPVAGIRSFDRLEEAILEANRLSFGLAGYAFTKSLATADILARRVEVGMLWVNSPATPTAELPFGGIKDSGYGTEGGPEALDNYINPRAVVVANV

SEQ ID NO: 28775 - protein, 147 aa, Medicago truncatula
MDLTDQQLKPCRCGYEICVWCWHHIMDMAEKDDTDGRCPACRSPYDKEKIVGTAAKCERLLNEMNLEKKVKNQKAKSKSSDGRKQLSSVRVIQRNLVYIVGLPLDLADEDLLQKREYFGQYGKVLKVSMSRTAAGVIQQFPNETCSV

SEQ ID NO: 28776 - protein, 287 aa, Carboxydothermus hydrogenoformans Z-2901
MAERLTGKPVADAIKEELKGRVADLKAKGIVPKLGIVRVGARPDDLYYEGGAKKTCESIGMDYEVFEYPQDIDQESFEKAIIEIGAKKDIHGILMFSPLPKHLNERKIRSLIPVEKDVDSLTLGSAGKVFADDPTGFPPCTPTAVMEILKYYNIPLEGKRAVVLGRSLVVGKPAAILLLRENATVTICHSRTKNLPDVCREADILVAAVGRAKMVKEDYVKPGMVVIDVGINEDPDNPGKYCGDVDFDKVEPIVDKITPVPGGVGSVTTAVLCKHTVKACEILNGLV

SEQ ID NO: 28777 - protein, 292 aa, Legionella pneumophila
ALTKGLGAGANPQIGREAAEEDREHIKEILSGADMVFITAGMGGGTGTGAAPVFAEIAKELGILTVAVVTKPFSFEGKQRALAAEEGIRRLAEHVDSLITIPNNKLLSVLGKNISLLNAFKAANNVLLGAVKGISDLITRPGLINVDFADVRTVMSEMGMAMMGTGSAVGEQRARQAAEAAIASPLLEDVNFSGARGILVNITAGLDMSIGEFEEVGDVVKEFISDDATVVVGTVIDPEMTDEMRVTVIVTGLGDNRQRQQQPQQPLRARLVETTRSDGSLDYQQLERPAVI

SEQ ID NO: 28778 - protein, 464 aa, Listeria innocua
MTEIPEIGEYQYGFHDKDTSVFRTERGLTEKVVREISNIKEEPEWMLEFRLKSLEQFYKMPMPTWGGDLSELKFEDITYYVKPSEQTVRSWDEVPEEIKRTFDKLGIPEAEQKYLAGASAQYESEVVYHNMKQDLEDLGIVFKDTDSALKENEDIFKEYFAKVIPPSDNKFAALNSAVWSGGSFIYVPPGIKVDTPLQAYFRINSENMGQFERTLIIVDENASVNYVEGCTAPVYTTNSLHSAVVEIIVKPGAYCRYTTIQNWANNVYNLVTKRTFCEENATMEWIDGNIGSKLTMKYPAVHLRGEGARGTTLSIAIAGKGQRQDAGAKMMHYAPNTSSTIVSKSISKQGGNVTYRGIVHFGRNADGARSNIECDTLIMDNLSTSDTIPYNEILNSNISLEHEAKVSKVSEEQLFYLMSRGLSEEEATEMIVMGFIEPFTKELPMEYAVEMNRLIKFEMEGSIG

SEQ ID NO: 28779 - protein, 735 aa, Ralstonia solanacearum
MFGPTSQPAAPPRQQVVSIAGLTEKLSYLKPADIKLVKEAFHFSDEAHLGQYRQSGEPYITHPVAVAEICAGWKLDVQSIMAALLHDVIEDQGVTKSELAEKFGPKVAELVDGLTKLDKLEFQSREQAQAESFRKMLLAMARDVRVILVKLADRTHNMRTLDHVPPEKRRRIAGETMEIYAPIAHRLGLNTTYRELQELSFRIGSPFRYATLEKAVKAARGNRREVVSRILEAAQRALGDAGVSAELTGREKTLYSIYRKMHDKQLSFSQVLDVYGFRVVVETQMHCYMAVGALHGLYKPMPGKFKDYIAIPKINGYQSVHTTLVGPFGTPVEFQIRTREMNQIAEAGVAAHWMYKQHHDEPDRAQQQAHQWLQSLLDIQSQSGDSQEFLEHVKIDLFPDAVYVFTPKGEIRALPRGATALDFAYAVHSDLGNQCVAVKINNALLPLRTELKNGDIVEVVTAPYSKPNPAWLTFVRTGKARAAIRHFLKTAKLDEAIQLGERLLEQALRQLGIDMKAVPAQVWERIVQWTGNKAREDIFADLALGRRVAAVVARRIEIGLQEGGHEGDEALIAAVHAFAGEEAPAVTVSGDEGMAMVFSPCCRPIPGDPIVGYIGKGEGLQIHVEECRVAKRLHGKDPEHWIDVMWAEHTTRAFDVSIKVLVRNTKGILARVAADLTSADANVAHVSMEQEGGGQEATYMTFLIQVHDRVHLADVMRALRRNLDVIRIARDRGGE

SEQ ID NO: 28780 - protein, 320 aa, Anaplasma phagocytophilum HZ
MSRKIAVVLFNLGGPASLREVESFLFNMFNDSHIVSAPRPFRYFLAKAISKLRARSSREIYTLMGGKSIVEQETAKQAIALEELLNKNAETGCSYKVFTCMRYSAPNALTVLGDIDEYKPCKVVLLPMYPQYSSATTQSSIEDWFSTSHKAGYSFWTDIIWDYHSDEHFIAAHCKLISEAYEKALALNARARILFSAHSLPVSFIEKGDPYKQQLRQTVLSILQNMGLQSIDNTLCYQSKLGPVRWLEPSTKSELLRACNDNVSVVLVPIAFVSENSETLVELDIEYKALVGEKKFIRVPTLGTDPKFIECLCNLVLAKQ

SEQ ID NO: 28781 - protein, 475 aa, Streptomyces coelicolor A3(2)
MSLHQGPRPSRDSDRDRRRLAVNPFHAAANPLGGMTEAPPAHRLPDSPLPPESAYRLVHDELMLDGNARLNLATFVTTWMEPQAGVLMSECRDKNMIDKDEYPRTAELERRCVAMLADLWHAPDPSTAVGCSTTGSSEACMLAGMALKRRWALRNADRYPAKDVRPNLVMGVNVQVCWDKFCNFWEVEARQVPMEGDRFHLDPQAAAELCDENTIGVVGILGSTFDGSYEPVADLCAALDALQERTGLDVPVHVDGASGAMVAPFLDEDLVWDFRLPRVASINTSGHKYGLVYPGVGWALWRDAEALPEELVFRVNYLGGDMPTFALNFSRPGAQVVAQYYNFLRLGREGYRAVQQSARDIAGSLAERVAALGDFRLLTRGDQLPVFAFTTADDVTAYDVFDVSRRLREGGWLVPAYTFPPHREDLSVLRVVCRNGFSADMADLLLADLERLLPELRRQPGPLTRDKGAATGFHH

SEQ ID NO: 28782 - protein, 165 aa, Zea mays
MAASSTATSVHDFIVKDASGKDVDLSTYEGKVLLIVNVASQCGLTNSNYTELAQLYEKYKDQGFEILAFPCNQFGGQEPGTNEEIVQFACTRFKAEYPIFDKVDVNGSNAAPIYKFLKSSKGGLFGDSIKWNFSKFLVDKEGRVVDRYASILPGSPCHQISPRMN

SEQ ID NO: 28783 - protein, 565 aa, Yersinia pestis biovar Medievalis str. 91001
MELEYESKRPLYIPYAGPILLEFPLLNKGSAFTNDERNHFNLHGLLPEAVETIEEQAERAYRQYQDFKNDDDKHIYLRNIQDTNETLFYRLLEAHLSEMMPIIYTPTVGEACEHFSDIYRRARGLFISYPNREHIDDMLQNATKQNVKVIVVTDGERILGLGDQGIGGMGIPIGKLSLYTACGGISPAYTLPVVLDVGTNNPQRLNDPLYMGWRHPRISGDEYYAFVDEFIQAVKRRWPNVLLQFEDFAQKNATPLLNRYRDELCCFNDDIQGTAAVTLGSLIAASHAAGSQLRDQTVTFLGAGSAGCGIAEQIIAQMMSEGLSEIQARARIFMVDRFGLLTDKLPNLLDFQSKLVQKSDDLHHWNLHNDAISLLDVVRNAKPTVLIGVSGQPGLFTEELIREMHSHCARPIVMPLSNPTSRVEARPEDIINWTDGAALVATGSPFPPVSYKEKLYPIAQCNNSYIFPGIGLGVLASGASRVTDGMLMAASRALAESSPLARHGEGALLPNIDDIQAVSKAIAMRVGQAAQLQGVAIVTSEEALSKAIEHNYWQPQYRSYKRTSF

SEQ ID NO: 28784 - protein, 637 aa, Lycopersicon esculentum
MPTLVNYSGDDEFYSGGSFCSADLGLMLSLGHADVYCPPRKRARISGPFVVEDRSKDPSLEVLPDECLFEILRRLPGGRERGAAACVSKRWLTVLSSVKNSEICRSKSYNNLNDAIMISKDEDLEVECDGYLTRCVEGKKATDIRLAAIAVGTSTRGGLGKLSIRGSNSVRGITNVGLSAVAHGCPSLRVLSLWNVPSIGDEGLLEVARECHSLEKLDLSHCRSISNKGLVAIAENCPSLTSLTIESCPNIGNEGLQAVGKYCTKLQSLTIKDCPLVGDQGVASLLSSGASMLTKVKLHGLNITDFSLAVIGHYGKLITSLNLCSLRNVSQKGFWVMGNAQGLQSLVSLTITLCQGATDVGLEAVGKGCPNLKYMCIRKCCFVSDGGLVAFAKEAGSLESLILEECNRITQVGILNAVSNCRKLKSLSLVKCMGIKDLALQTSMLSPCESLRSLSIRSCPGFGSSSLAMVGKLCPKLHQLDLSGLCGITDAGLLPLLENCEGLVKVNLSDCLNLTDQVVLSLAMRHGETLELLNLDGCRKVTDASLVAIADYCPLLIDLDVSKSAITDSGVAALSRGVQVNLQVLSLSGCSMVSNKSVLSLKKLGENLLGLNLQHCSVSCSSVELLVEALWRCDILS

SEQ ID NO: 28785 - protein, 166 aa, Oryza sativa (japonica cultivar-group)
MKEGGGGGGERRNILAKTIDRCRSSLGHRTTRRPASAAGGGGYGGAAVPAGFFAVLVGPEKERFAVRARCANHPLFRALLDQAETEYGFAGCEGPLELPCDVDAFMDVMWEMEQADPAASPRCGARFGGPAAAGSGRGYGGHGHHHQHQGYQMMSTPARLLVAGRS

SEQ ID NO: 28786 - protein, 263 aa, Ralstonia metallidurans CH34
MQFETLLYEVVDGVAIIRLNRPDRMNTLGGTMKPDLARAFFELARDDTSVRCVVLTGTGDRAFCAGADIKERAGGTAHPADYYVTQQRTHELFRGIEEFEKPVIAAINGVALGGGLELALCADIRLAARSARFGLPEIKLGVIPAAGGTQRLPRVVGPAIAKELIFTSELINADAAKDIRLVNRVIDDDKLMDAALTMARRIAAQPPLAVRFAKRSVNLGMQGSVDMGLQFECYGAAMVMDSEDRKEGMRAFVEKREPRFVGR

SEQ ID NO: 28787 - protein, 665 aa, Rhodospirillum rubrum ATCC 11170
MAIKITLPEGPETPHLKPRITVVGVGGAGGNAVNNMIDAELAGVDFVVANTDAQALCHSRTSRRIQLGTEATRGLGAGARPEVGRVAAEEAVEAIAGELQGANMVFITAGMGGGTGTGAAPVVASVARELGILTVGVVTKPFQFEGAHRMRLAEAGIDELAQFVDTLIIIPNQNLFRVANEKTTFADAFKLADDVLYSGVRSVTDLMINPGLINLDFADVRTVMQNMGRAMMGTGEAEGERRALEAAEAAIANPLLEDTSMRGARGVLINITGGTDVTLYEVDEAANRIRDEVESDAHIIFGSSLDPSLDGHIRVSVVATGINAEDVARLNGNDPGQAVRAVADPRPEARIVPEVKIARPAERSHAERIAAAVGAERAGLTAAKAALAGRPPLAGQPAAAYAAEGHDGAPAMVGKSAKAEKAVRLLESLVLEANAKKDAKAAIAGSAALARPELRPEPRPEPRPPVIAPRGALAPRLSRDTFIPSPAMEVNARGTAAMAAAQVPSYETRSSDRDVSRAGRLEAPEPEHEPARRPLMSREEEPIAAYRDDDLDPGEVYVDDVAYDPRPAREFRPALPEGARAAYQAQMRRATEDHPREEPRAPRVEKPSLLARITGLGGRSAGHEHRDGNPLLSAKTLSAQADDRPVASQPDDQLEIPAFLRRQAN

SEQ ID NO: 28788 - protein, 424 aa, Burkholderia sp. 383
MAIVEVKVPQLSESVSEATMLQWKKKPGEAVAQDEILIELETDKVVLEVPAPAAGVLAQVLQNDGDTVVADQIIATIDTEAKAGAAEAAAGAAEVKPAAAPAAAAPAAQPVAAAASSTTASPAASKLLAEKGLSAGDVAGSGRDGRVTKGDALAAGSAPKAAPAAAPAKTAAAKPALPEVKVPASAATWLNDRPEQRVPMSRLRARIAERLLESQQTNAILTTFNEVNMAPVMELRNKYKDKFEKEHGVKLGFMSFFVKAAVHALKKFPLVNASIDGNDIVYHGYFDIGIAVGSPRGLVVPILRNADQLSLAEIEKKIAEFGQKAKDGKLSIEEMTGGTFSISNGGVFGSMLSTPIINPPQSAILGVHATKERPVVENGQIVIRPINYLALSYDHRIIDGREAVLSLVAMKDALEDPARLLLDL

SEQ ID NO: 28789 - protein, 102 aa, Pseudomonas syringae pv. tomato str. DC3000
MQVNISGHQLEVTKPLREYVELKLKKLEGHFDKITNVQVTMAVEKLKQKIEATLHIHGGEVVANAEHDDMYAAIDLLTDKLDRQLLKHKEKQQSILKGAAAR

SEQ ID NO: 28790 - protein, 314 aa, Rhodobacter sphaeroides 2.4.1
MTHSMPTPAEPLKIGTRGSPLALAQAYETRSRLSAAFSLPEEAFEIVVIKTTGDKVLDRPLKEIGGKGLFTREIEEALLSGGIDIAVHSMKDMPTLQPEGLILDTYLPREDTRDAFITFAEGGLADLPQGATVGSSSLRRRAQLLNKRPDLQVVEFRGNLQTRLKKLNDGVARGTFLAMAGLNRLKMNEVPRVPIESEEMLSAVAQGAIGIERRTDDPRAQEMLAAIHDVPTGHRLAAERSFLLKLDGSCETPIAGLAILEGDQLWLRGEILRPDGSESISGEIRGAIADAAALGSELASELLGRAPADFFSWR

SEQ ID NO: 28791 - protein, 232 aa, Stephanomeria virgata subsp. virgata
GGRYSVCSAVGVLPLSLQYGFPVVEKFLKGARSIDQQFLSAPFEKNIPVLLGLLSVWNVSFLEYPARAILPYTQALEKLAPHIQQVSMESNGKGVSIDGIRLPFEAGEIDFGEPGTNGQHSFYQLIHQGRVIPCDFIGIVKSQQPVYLKDEVVNNHDELMSNFFAQPDALAYGKTPEQLQSENVASHLVPHKTFTGNRPSLSLLLPSLDAYRIGQLLAIYEHRIAVEGFIWG

SEQ ID NO: 28792 - protein, 117 aa, Borrelia garinii PBi
MAVSLTKEDFVAKVFDYKNNKEWSFIGKRPAIIDFYADWCGPCKMLSPIFEKFSKKYENRIDFYKVDTDKEQDVVSVLGVKSLPTILFIPVDGKPKVSVGFLQEDAFENIIKDFFGF

SEQ ID NO: 28793 - protein, 436 aa, Brassica napus
MKGIRKNYENSYTLSFLLVFFVLILLPPAFSINTLSSEESLTISSNRTLVSRGDVFELGFFKTTSSSRWYLGIWYKKFPYRTYVWVANRDNPLPNSIGTLKISNMNLVLLDHSNKSVWSTNLTRRNERTPVMAELLANGNFVMRDSNNNDASEFLWQSFDYPTDTLLPEMKLGYNLKKGLNRFLISWRSSDDPSSGDYSYKLEPRRLPEFYLLQGDVREHRSGPWNGIRFSGILEDQKLSYMEYNFTETSEEVAYTFRMTNNSFYSRLTLSSTGYFERLTWAPSSVVWNVFWSSPNHQCDMYKICGPYSYCDVTTSPVCNCIQGFRPKNRQQWDLRISLRGCIRRTRLSCSGDGFARMKYMKLPETTMAIVDRSIGVKECEKRCLSDCNCTAFANADVRNGGTGCVIWTGRLDDMRNYVPDHGQDLYVRLAAADLV

SEQ ID NO: 28794 - protein, 630 aa, Oryza sativa (japonica cultivar-group)
MPLLAAAAAVAPPLSSFHSLSLSSRGLRVPSPCEARPRAPLRRGDLAIRMGGGPRTFPGGVSKWQWKRMQARKAKQLLKARLARERQLYEMRKRAELRDAAAHLERPWDPDASDSAAAAAAAPNLLSVAADDQMKALADRFHRPGGVDLWNDRDGPRVFAAPDTGRASARFFPKGSVHSVQPYGLVNGGLESTLAARGNPSDATDRSHRHRLQGVRENAAKKEMRGVGGDREPAVEYIERGGVWEPVSNLDGGDDDDSSDGGWNDDIVTSDLEDMGDVDLRPEQRAMVGRDRRKDNVARWEATTSVAIGSDGVRDQRGNGFSLEPEGTSEYHLGQSWQERNSGSRGKRPAGRRKALNTDGGSAIGKDRVVGGSSFSDSEVTRNGFEPKWRSTTRGRTTNDVRRWNPPNEGGRNVPRKGWTDDEFGSNSDSGMDHKLMPKWKTQNRLNRSENGRDRPELKYMANTNNGERTRRYMRGSDGEGRRDRFVNRFASDLEEPEWKPRRKSGAGNDGDGRRDRFVNRFASDLEEPKWKPGRKSGARMNIGNREYIDDMNGRFRRGSDGDGMNGRFRRGSNGAARLLDAMDSNREIGSEDDSYRMSRNGGQRRGDGYSLRPTSELHNSRRLRESNEM

SEQ ID NO: 28795 - protein, 581 aa, Arabidopsis thaliana
MEKVTNSDLKSSVDGGVVDVYGEDSATIEHNITPWSLSVSSGYSLLRDPRYNKGLAFTEKERDTHYLRGLLPPVVLDQKLQEKRLLNNIRQYQFPLQKYMALTELQERNERLFYKLLIDNVEELLPIVYTPTVGEACQKFGSIFRRPQGLFISLKDKGKILDVLKNWPERNIQVIVVTDGERILGLGDLGCQGMGIPVGKLALYSALGGVRPSACLPVTIDVGTNNEKLLNDEFYIGLRQKRATGQEYSELLNEFMSAVKQNYGEKVLIQFEDFANHNAFELLAKYSDTHLVFNDDIQGTASVVLAGLVSAQKLTNSPLAEHTFLFLGAGEAGTGIAELIALYMSKQMNASVEESRKKIWLVDSKGLIVNSRKDSLQDFKKPWAHEHEPVKDLLGAIKAIKPTVLIGSSGVGRSFTKEVIEAMSSINERPLIMALSNPTTQSECTAEEAYTWSKGRAIFASGSPFDPVEYEGKVFVSTQANNAYIFPGFGLGLVISGAIRVHDDMLLAAAEALAGQVSKENYEKGMIYPSFSSIRKISAQIAANVATKAYELGLAGRLPRPKDIVKCAESSMYSPTYRLYR

SEQ ID NO: 28796 - protein, 433 aa, Listeria innocua
MAENMTIKDDFIHAFSSNANEPDWFLDIRRNAFKAYGELDLPFVDKTKITRWNFTKFETFIPFKEGVTNETLPEKVANLVDLDNKEANFYVQMDERPARLQLQQELVDQGVIFTDIISAVKNHPELVKKYFMTDAVQVNENKLTAFHAALVNGGIFLYVPKNVEVKAPIQAVFVQEKAESPLVNHVLLVADDNSAVTYVENYVTVDNAPKGIVSIVEEVIAEKNARITFGGVDNLASGVTTYVNRRGHIGTDSQIEWALGLMNDGDTINENVTNLMGDGSSADVKTVTVGRGKQTQNVTTRVTHYGKASNGTILSHGVMKERATTIFNGIGHIKHGASKSDAQQESRVLMLSPEARGDANPILLIDENDVVAGHAASVGRVDPLQLFYLMSRGISQKEAERLVIHGFLDPVVRQLPIESVKTMLREVIEGKVR

SEQ ID NO: 28797 - protein, 263 aa, Sphingomonas sp. tfd44
MKDEVFVVVGGGQAGGWIIKTLGVEGFSGRIVLIGDERHPPYERPPLSKNALRDAEAVSETALLSIENLAEAKVESWLGEEVVKIDRSAQTVRCASGRENRYDRLFLATGSRPRVPDWMAGQKSDRIHLLRTIDDAAALRSSLSGTKHLLIVGGGWIGLEVAATVRSLGIAVTVVEAAPRLCQRSVPEPVSDWLRSLHEGHGVAFVMGRSVDQLVEQPDGIMLELDDGTARMADRVLVCVGAIPNVALAELAGLDVSNGILVD

SEQ ID NO: 28798 - protein, 592 aa, Borrelia garinii PBi
MDINKRLALLRDHMRKNGVDAYLVTGYDPHFSEYSHERYGARKFITGFSGSFGTVIITLSKAVLFTDGRYFLQADQELKGTQVTLIKLGVKGYPDIFTYINLNLQESKLGIYSDEINIKFYKELSRKCKNTHIEVLNQDLIDLIWESRPQLEFSHVVELIDTEKNNKRVEKIKSIYLTLENNSADFYVITALDEIAWILNLRGSDVKESALFYSFLLISKNQDRKNVLFIDTKKLDSSVKEALENENFEIEAYSNFYCYLDRIRHEGKFFVSLYTNLRVLKLLGENNVILGESIIGDLKAVKTDYELLKMKEAHVIDAIGLIKFLHKFKSLSKAELAELDEIDIADMLLHFRKLNKDFFSSSFDSIVGFKENGALPHYKPKRGKKINTNGLLLIDSGGSYFGLGTTDVTRVFLIGNASGEEKHDYTLVLKAFISLASLKFPYGSSGAFLDGICRLPLLKNELNFIHGTGHGVGFFLNVHELPVSISPNSNYPFKGSEVVSIEPGLYRTFSHGIRIENLVFVRQAFANDFGTFLEFENLTLVPFEKELIVKEMLSEDELNYINNYHECVFLTLKEHFNDEEELKFLAKLTSRI

SEQ ID NO: 28799 - protein, 746 aa, Roseovarius nubinhibens ISM
MTSEPSSPLATDQFAAKLEPLTVDTPCWTLTTDETDLRAVPVAELARMLEQLFLIRHFEERLLELSKEGLLHGPAHASIGQEGAAVGLMSALTSGDKINGTHRMHHQFLAKTLNHALVAEYDPLDQGFPQAAQEVVFKTYSEILGLKSGYCGGRGGSMHLREPEAGVLGSNAIVGGNIPHAVGYALADKMRGERAISVAFFGDGAMQIGTAYEAMNLAALYTTPTVFVVENNQYAVSTHVSEQTRETRLSLRGLGLGIPSITFDGMDVIAARRAMETARKIIETSGGPVLLEARTYRHLHQSGPLKGSAFGYRDKAEEDAWLARDPATTLPQQILRAGLLTEAQIDTLRSRATAAVDDTLDRLIEGSGKDRRLKPDLWPDPATVEYGIRGDLSELADKRHLEERDLTAETGVEAKFHDVISEVMLRNMEKFDGLFVLGEDVHRLRGGTAGATRGIAERFPDRLLGTPICENGFTGMALGAALNGARPVVEIMYPDFSLVAADQLFNQIAKVRHMFGGDFPVPVVVRSRVTQGTGYGSQHSMDASGLFTLYPGWRVVAPSTPHDYIGLMNAAIACDDPVLVVEYNELFQNKGQVPTGDWDYIIPFGKARIARPGTQATILTYGPMVESCTKLCDSTGLDAEVIDLRTLDPLGLDWETITASVAKTNALLMVEQTTRGTSIGSRVVNDAQRRLFNHLDYEILHVTGTESSAVVSKVLEEAAFARPADVEAALRQVISDRHPALQGASA

SEQ ID NO: 28800 - protein, 388 aa, Shigella flexneri 2a str. 301
MIQFRVVWVDDRNQIQVNRAWRVQFSSAIGPYKGGMRFHPSVNLSILKFLGFEQTFKNALTTLPMGGGKGGSDFDPKGKSEGKVMRFCQTLMTELYRHLGADTDVPAGDIGVGGREVGFMAGMMKKLSNNTACVFTGKGLSFGGSLIRPEATGYGLVYFTEAMLKRHGMGFEGMSVSVSGSGNVAQYAIEKAMEFGARVITASDSSGTVVDESGFTKEKLARLIEIKASRDGRAADYAKEFGLVYLEGQQPWSVPVDIALPCATQNELDVDAAHQLIANGVKAVAEGANMPTTIEATELFQQAGVLFAPGKAANAGGVATSGLEMAQNAARLGWKAEKVDARLHHIMLDIHHACVEHGGEGEQTNYVQGANIAGFVKVADAMLAQGVI

SEQ ID NO: 28801 - protein, 332 aa, Campylobacter jejuni subsp. jejuni NCTC 11168
MAVKVAINGFGRIGRCVARIILERNDIELVAINDTTDIELTKYLFKYDTVHGEFKGSVDSEGDDLVVNGKKIKVFKSRNVKDLDFAKHGAQIVLECTGAHLTMAKCQEFIDMGVQKVIMSAPAKDDTPTYVLGVNSELYKGESIISNASCTTNCLGPVCRVLQDNFGIEKGLMTTIHAYTNGQSIIDAKAKDKRRSRAAAQNIIPTSTGAAKAMKLVMPELNGKLHGQSMRVPVIDVSSVDLTAQLSRKVSKDEINEAFRKAAATNLKGILMVDDDERVSSDFITCSYGAIVASDLTQVIADDFIKVIAWYDNEWGYSSRLVDMAVYIANKA

SEQ ID NO: 28802 - protein, 314 aa, Arabidopsis thaliana
MGGSREFRAEEHSNQFHSIIAMAIWLGAIHFNVALVLCSLIFLPPSLSLMVLGLLSLFIFIPIDHRSKYGRKLARYICKHACNYFPVSLYVEDYEAFQPNRAYVFGYEPHSVLPIGVVALCDLTGFMPIPNIKVLASSAIFYTPFLRHIWTWLGLTAASRKNFTSLLDSGYSCVLVPGGVQETFHMQHDAENVFLSRRRGFVRIAMEQGSPLVPVFCFGQARVYKWWKPDCDLYLKLSRAIRFTPICFWGVFGSPLPCRQPMHVVVGKPIEVTKTLKPTDEEIAKFHGQYVEALRDLFERHKSRVGYDLELKIL

SEQ ID NO: 28803 - protein, 958 aa, Pseudomonas aeruginosa PAO1
MSQTPSLAQLQPADAFLRRHLGPDPAEQQAMLAFLGVSTRAELIVQTVPPAIRLNRPLELPAALDEQAALARLRGYAGLNQRWTSLIGMGYYGTVTPSVILRNVLENPGWYTAYTPYQPEIAQGRLEALLNFQQLTIDLTGLDLASASLLDEATAAAEAMALARRVAKARSNRFFVDAHCHPQTVSVLRTRAEAFGFELVVDEPDNLAAHAVFGALLQYPDSRGEIRDLRPLIEALHGQQALACVASDLLALLLLTPPGELGADVVLGSAQRFGVPMGYGGPHAAFFATREGYKRAMPGRIIGVSRDARGNPALRMALQTREQHIRREKANSNICTAQVLLANIASLYAVYHGPQELKRIAQRVQRLTALLAAGLKSKGLRRLNRHFFDTLTYEVGERQAAILERARAARVNLRVVDDRRLALSLDETCDAATLATLFEIFLGAGHGLDVAHLDGGAVADGIPAVLQRTSAYLQHPVFNAHHSETEMLRYLRQLEGKDLALNQAMIPLGSCTMKLNASSEMIPITWPEFAELHPFVPREQAEGYRRMIDELEAWLRAITGFDAICMQPNSGAQGEYAGLLAIRRYHQSRGDSQRDICLIPASAHGTNPASAIMASMRVVIVECDPRGNVDLDDLRLKAAEAGDRLSCLMITYPSTHGVYEEGIGEICEVVHRHGGQVYMDGANLNAQVGLARPADIGADVSHMNLHKTFCIPHGGGGPGMGPIGVKRHLAPFVANHPVIRVEGPNPLNDAVSATPWGSASILPISWMYIAMMGPQLADASEVAILSANYLANRLDGAFPVLYRGRNERVAHECILDLRPLKAQTGITEEDVAKRLMDYGFHAPTMSFPVPGTLMVEPTESESKAELDRFVEAMLSIRAEIGKVESGAWPAEDNPLKRAPHTLADVTGIWQRPYEIAEAVTPSEHARAFKYWPAVNRVDNVYGDRNLFCACVPLDDYRE

SEQ ID NO: 28804 - protein, 615 aa, Oryza sativa (japonica cultivar-group)
MASISGAAAAAPSSSGASCGLRLRRDHLPRSSHFRLARPSSITDVSRSCSSSSSSPPRSLSSKQSGHADVLAHGAVDKDPIRLWNRYVEWLYQHKQLGLFVDVSRIGFTEEFLRRMEAPMGRAFAAMRELEKGAIANPDEGRMVGHYWLRNPALAPNSFLRDKIETTLERILAFASDVISAKIRPPSSPAGRFTQILSIGIGGSSLGPQFVAEALAPDNPPLMIRFIDNTDPAGIDHQIAQLGPELASTLVIVISKSGGTPETRNGLLEVQKAFRDAGLEFSKQGVAITQENSLLDNTARIEGWLARFPMFDWVGGRTSEMSAVGLLPAALQGIDIKEMLVGAAQMDEETRNTEIKENPAALLALCWYWASDGIGSKDSLLLLSRYLQQLVMESLGKEFDLDGNRVNQGLTVYGNKGSTDQHAYIQQLREGVHNFFVTFIEVLRDRPPGHEWELEPSVTCGDYLFGMLHGTRSALYANDRESITVTVQEVNPRAVGALVALYERAVGLYAYLININAYHQPGVEAGKKAAGEVLALQKRILLVLNEASCKDPAEPLTLDQIADRCHCPEEIEMIYKIIQHMAANDRALIAEGNCGSPRSIKVYLGECNVDDDMNS

SEQ ID NO: 28805 - protein, 956 aa, Pseudomonas aeruginosa UCBPP-PA14
MLSAVFCLLPIILQPLPVAAESILLDGRMTTTTRPWLDKRARQWLDAREPLTIGVVSPDYPPLSIFYAGSYKGFTADYLALVFERPLRVRDFPSRQAAIAALSRGEIDLLGVGSEVEARQHGLLASAAYLSDRPVLVSSSGAPFDSQAESWLATVKGYLPAERIKAAYPHSKVIWFDSPQLALEALSMGDVDGVLGDAVSAHYLIQTHYLLNLRIENFAPIDSQGFRFLLRPGDEPLLAVLDRALPRINGRYGDELLRSWSAGRRLRFDEPRVTLAPAEQRWLSTHPVVPVVINHSLGALGQLDSEGRLSGIGRDYLDLIGKRSGLQFSFSGARNFVEAKRRLDAGEALVTPTMPSTERLDSGLEVLTPYLRSTTVLMSASRGGRGERLERVHGLADLDGKRLATTVGYFLNDTIRRDHPEIKLQVYPTFLAAMQSVDAGQSEASISSDYTGRYLSAQHFDNRIQVVGILDDLSIPISIGVARNQPELQGILEKAQLAIAPEEVAEILHRWEPRFAKGGTDFWRDHRSKILQIGGLFGVLISISLIWGFYLMRQVRKTRQAEEQADAANRAKSVFLSTMSHEIRTPLNAVIGLQELVLKKGEKGVLDLDSLSIAQEAAQGLLLLLGNILDLSRIESGRFDSAPEPVLPGELIRGILPLVGGLTRQKNLSLALELDGDLEQWVLVDPLHFKQVLFNLLGNAIKFTERGGVTVRAVGRREAERLHLLLEVSDTGLGISEEDQARLFRPFSQVGSPALGQASGSGLGLYISRRLVHLMGGQISLRSELGNGSCFSVEFDLPLTEPPPSESSEARSGVAEVEERKEARALSILLAEDHPFNRLTLTMQLESLGHRVTSTEDGEEAFERWQGEDFDVVITDGMMPRMDGYELARRIRSQEALGGRRRCLVIALTASAEKDALERCLAAGMDRVLFKPTTLDELARALNGGEPLMPTSVDSQ

SEQ ID NO: 28806 - protein, 333 aa, Arabidopsis thaliana
  misc_feature (14)..(14): Xaa can be any naturally occurring amino acid
MATSTTMSHQAIGXSVVSQRPFKASQFLKEPLNNVPMKFRQKRFKIEATASQISVVDNTFLSPSPSKNKPHESKKKSNEAALILIRHGESLWNEKNLFTGCVDVPLTQKGVGEAIEAGKKISKIPVDLIFTSSLIRAQMTAMLAMTQHRRKKVPIILHNESVKAKTWSHVFSEETRKQSIPVIAAWQLNERMYGELQGLNKKETAERYGTQQVHEWRRSYEIPPPKGESLEMCAERAVAYFEDNIKPELASGNNVMIAAHGNSLRSIIMYLDDLTSQEVTTLDLSTGVPLLYIFKEGKFMKRGSPVGSTEAGVYAYTKRLAQYREKLDAAATI

SEQ ID NO: 28807 - protein, 49 aa, Lycopersicon chilense
ASLLGEAITGKGILAQLNLETGIPIYEAEPLLLFFILFNLLGAIGALGD

SEQ ID NO: 28808 - protein, 442 aa, Mycobacterium avium subsp. paratuberculosis K-10
MPALLWFRRDLRLHDHPALSAAADSDEVLACFVLDPRLQRSSGPRRLQFLGDSLRVLRDELDGRLLVTRGRPDIRIPEIAKAIGASSVHVSEDFTPFGKRRDARVRAALASVPLVATGSPYLVAPGRVTKPDGSPYQVFTPFLRRWRDTGWRPPVKTGAASARWLDPARLGITDCEIPDPGATLDLAAGEEAARNKWKSFVDNGLANYADDRHRPDIEGTSRMSAHLKFGTIHPRTLVADLDLRAAAARAYLRELAFRDFYADVLHHRPASAWRNWNSAFDAIRTDTGAEAGRRFAAWKAGETGFPFVDAGMRQLRQTGFMHNRVRMTVASFLVKDLHLPWQWGAHWFLQQLVDGDLANNQHGWQWCAGCGTDAAPYFRVFNPAAQGEKFDPSGDYIRRWVPELRCADDPHLRTGERPPGYPAPIVDHATERAEALRRYRSM

SEQ ID NO: 28809 - protein, 442 aa, Bacillus subtilis subsp. subtilis str. 168
MAFEFKLPDIGEGIHEGEIVKWFVKPNDEVDEDDVLAEVQNDKAVVEIPSPVKGKVLELKVEEGTVATVGQTIITFDAPGYEDLQFKGSDESDDAKTEAQVQSTAEAGQDVAKEEQAQEPAKATGAGQQDQAEVDPNKRVIAMPSVRKYAREKGVDIRKVTGSGNNGRVVKEDIDSFVNGGAQEAAPQETAAPQETAAKPAAAPAPEGEFPETREKMSGIRKAIAKAMVNSKHTAPHVTLMDEVDVTNLVAHRKQFKQVAADQGIKLTYLPYVVKALTSALKKFPVLNTSIDDKTDEVIQKHYFNIGIAADTEKGLLVPVVKNADRKSVFEISDEINGLATKAREGKLAPAEMKGASCTITNIGSAGGQWFTPVINHPEVAILGIGRIAEKAIVRDGEIVAAPVLALSLSFDHRMIDGATAQNALNHIKRLLNDPQLILMEA

SEQ ID NO: 28810 - protein, 51 aa, Lycopersicon cheesmaniae
ASLLGEAITGKGILAQLNLETGIPIYEAEPLLLFFILFNLLGAIGALGDRG

SEQ ID NO: 28811 - protein, 47 aa, Lycopersicon pennellii
ASLLGEAITGKGILAQLNLETGIPIYEAEPLLLFFILFNLLGAIGAL

SEQ ID NO: 28812 - protein, 180 aa, Apium graveolens var. dulce
  misc_feature (24)..(24): Xaa can be any naturally occurring amino acid
GKFMTKPCEDPCPNVMSFTLKGIXQFYVNVDKEEWKLETLCDLYETLAITQSVIFVNTRRKVDWLTDKMRSRDHTVSATHGDMDQNTRDIIMREFRSGSSRVLITTDLLARGIDVQQVSLVINYDLPTQPENYLHRIGRSGRFGRKGVAINFVTKDDDRMLFDIQKFYNVVVEELPANVA

SEQ ID NO: 28813 - protein, 48 aa, Solanum lycopersicoides
ASLLGEAITGKGILAQLNLETGIPIYEAEPLLLFFILFNLLGAIGALG

SEQ ID NO: 28814 - protein, 610 aa, Halobacterium sp. NRC-1
MADDSIAVVDLDRCQPDRCNYECSNYCPPNRTGKECITLRGEDAGDGDPDQVHISEEICLGESCGICVEKCPFDAIEIINLPQELDDQPTHRYGENSFSLYGLPVPESGKVTGLLGPNGIGKSTAVDLLAGEVTPNLGRHESPPDWDEVVDEYRGTELQDYLAAVRDGDVDVAKKPQYVDEIPAQFDGNTRQLLEATDERGVLDDLVDRLSIRPVMDQAIDSLSGGELQRVALAATLARDADFYFVDELTPYLDIGQRVTAARLVRELAEDADKAVLVVEHDLAVLDMLADSIHVAYGEPSVYGVVTPPKSVRNGINEYLRGYLENENMRVRPEAIEFEEHAPRSASRRDTLVSYPDMTKSYGDGEFTLSVEGGDINRNEVLGVVGPNGIGKSTFAQLLAGGLEPSSVGGEAGAALDVGLDIAYKPQYVEADQQMRVDAFLSSVTDDVGTSYWQTEIADPLQLDPIMEQRLPDLSGGERQRVAIAATLSKDADLYLLDEPSAHLDVEQRVLATRAIRRFAENNESTVMVIDHDIYMIDLVSDRLMVFDGEPAEHGQASPPQAMRSGMNEFLANLDVTFRRDERLGRPRINKPDSQLDKQQKRDGEYYYTT

SEQ ID NO: 28815 - protein, 289 aa, Bacillus anthracis str. A2012
MVFVTAGMGGGTGTGAAPVVAQVAKELGALTVGVVTRPFTFEGRKRATQAASGIAAFKENVDTLIVIPNDRLLEIVDKNTPMLEAFREADNVLRQGVQGISDLIATPGLINLDFADVKTIMSNRGSALMGIGSGNGENRAAEAAKKAISSPLLETSIDGAQGVIMNITGGANLSLYEVQEAADIVASASDPEVNMIFGSVINEGLKDDIVVTVIATGFDDSIATQPPKPIIRPNVNHTQQQQQPVAQPPKQREVKREMKREEPVVHERHSDSDSDDIDIPAFLRNRRRR

SEQ ID NO: 28816 - protein, 196 aa, Selaginella lepidophylla
MADTEFFTEYGEASRYKIQEVIGKGSYGVVCSAIDTHTGEKVAIKKINDIFEHVSDATRILREIKLLRLLRHPDIVEIKHIMLPPSRREFKDIYVVFELMESDLHQVIKANDDLTPEHYQFFLYQLLRALKYIHTGNVFHRDLKPKNILANAYCKLKICDFGLARVAFNDAPTAIFWTDYVATRWYRAPELCGSFF

SEQ ID NO: 28817 - protein, 177 aa, Silene latifolia subsp. alba
MASLMSNAAVVTASTAAQANMVAPFSGLKSTSAFPVSRKSNVDITSLATNGGRVNCMQVWPPRNLKKFETLSYLPTLSEESLLKEINYLLIKGWVPCLEFEVGPAHVYRENNKSPGYYDGRYWTMWKLPMFGCTDASQVAAEVVECKNAYPDAHVRIIGFDNKRQVQCISFIAYKPE

SEQ ID NO: 28818 - protein, 291 aa, Xanthomonas campestris pv. vesicatoria str. 85-10
MSVLINKNTKVIVQGFTGQQGTFHATQMVEYGTQVVGGVTPGKGGTTHINLPVFNTVADAVQATGADASVIYVPPPYAADAILEAAAAGIKVIVCITEGIPVLDMLRVKNVLTRSHPDTVLIGPNCPGVITPGECKIGIMPGHIHKPGKIGIVSRSGTLTYEAVKQTTEVGLGQSTCIGIGGDPINGLNFVDCFKLFNEDPQTEGIIMVGEIGGDAEEAGAEYIKNHVKKPVVGFIAGASAPAGKRMGHAGAIASGGKGTAEGKFAAMEAAGVKTVRSPGDLGAAIAALVK

SEQ ID NO: 28819 - protein, 209 aa, Bordetella bronchiseptica RB50
MSVSPARDLSTTLLADAGARVMSAGIKPLRAGWHVHGRALTVSVDAGDNLAIHAALAQARPGEVLVIDAQGYLDRAVMGGIMCAQAAAVGLAGVIIDGAMRDLAELRAGTLPAYALGGSPAGPTKRGGGTVRRAIRCGGVDVRPGDWIMADDDGVVVYRDDEAEAVLAATLAKQQAEAARMAAIARGELRPAWLDDALARAPIDTGKSA

SEQ ID NO: 28820 - protein, 173 aa, Pseudomonas syringae pv. phaseolicola 1448A
MSLHELNTLPGVTADPEAATRQFVFNHTMLRVKDITKSLDFYTRVLGFSLVEKRDFPEAEFSLYFLALVDKAQIPEDDKARNEWMKSIPGILELTHNHGTESDATASYHNGNSDPRGFGHICVSVPDVKVACERFETLGVDFQKRLSDGRMNSLAFIKDPDGYWVEIIQPTPL

SEQ ID NO: 28821 - protein, 232 aa, Stephanomeria virgata subsp. virgata
GGRYSVCSAVGVLPLSLQYGFPVVEKFLKGARSIDQQFLSAPFEKNIPVLLGLLSVWNVSFLEYPARAILPYTQALEKLAPHIQQVSMESNGKGVSIDGVRLPFEAGEIDFGEPGTNGQHSFYQLIHQGRVIPCDFIGIVKSQQPVYLKDEVVNNHDELMSNFFAQPDALAYGKTPEQLQSENVASHLVPHKTFTGNRPSLSVLLPSLDAYRIGQLLAIYEHRIAVEGFIWG

SEQ ID NO: 28822 - protein, 643 aa, Nicotiana tabacum
MATHHSHYDPENSTTHYTVLPDQPESAGSGHRKSLKVVSGILLSSFFLLSLVFVIVNQSSDLSQKNSHSSETLTPALSRGVSQGVSEKTFRDVSGGSLSYYPWTNAMLTWQRTAYHFQPQKNWMNDPNGPLYHKGWYHLFYQYNPDSAIWGNITWGHAISTDLIHWLYLPFALVPDQWYDINGVWTGSATFLPDGQIMMLYTGDTNDYVQVQNLAYPANLSDPLLIDWVKYRGNPVMVPPPGIGVKDFRDPTTAWTGPQNGQWLLTIGSKIGKTGIAIVYGTSNFTNFKLLDGVLHAVPGTGMWECVDFYPVSTDEANGLDTSYNGPGIKHVLKASLDDDKHDYYAIGTYDPVKNKWTPDNPQLDVGIGLRLDYGKYYASKTFYDPKEQRRILWGWIGETDSEAADLLKGWASVQSIPRTVLYDKETRTHVLQWPVKEIESLRIGDPLVKRVNLQPGSIELVHVDSAAQLDVEASFEVDKAALEGTIEADVGFNCSTSGGAAKRGILGPFGVVVIADQTLSELTPVYFYIAKGPDGRAETYFCADETRSSEAPGVAKQVYGSSVPVLDDEQHSMRLLVDHSIVESFAQGGRTVITSRIYPTKAINGAARLFVFNNATRASVTASLKIWSLESADIRSFPLDQL

SEQ ID NO: 28823 - protein, 151 aa, Stephanomeria virgata subsp. virgata
HIQQVSMESNGKGVSIDGVRLPFEAGEIDFGEPGTNGQHSFYQLIHQGRVIPCDFIGIVKSQQPVYLKDEVVNNHDELMSNFFAQPDALAYGKTPEQLQSENVASHLVPHKTFTGNRPSLSLLLPSLDAYRIGQLLAIYEHRIAVEGFIWG

SEQ ID NO: 28824 - protein, 300 aa, Arabidopsis thaliana
  misc_feature (153)..(153): Xaa can be any naturally occurring amino acid
MASSSDHTAKIIDGKAIAHTIRSEIAEEVRGLSEKHGKVPGLAVVIVGSRKDSQTYVNTKRKACAEVGIKSFDVGLPEEVSEADLISKVHELNSNPDVHGILVQLPLPKHINEENILGAISIDKDVDGFHPLNIGKLAMKGREPLFLPCTPKXGCLELLARSGVKIKGQRAVVVGRSNIVGLPVSLLLLKADATVTTVHSHTKDPEAIIREADIVIAACGQAHMIKGNWIKPGAAVIDVGTNAVSDPSKKSGYRLVGDVDFAEASKVAGFITPVPGGVGPMTVAMLLRNTVDGAKRVFGE

SEQ ID NO: 28825 - protein, 317 aa, Xanthomonas campestris pv. campestris str. ATCC 33913
MGLRLPRRWPAQRRGRGACTGSAVVTQLLREAITDAVPLPPTEGGGTGRLHGPLRSAIYTGWVRHRRYAPKPLQFRYRLFLMYLDLAELEHVFARRWLWSVGRANLAQFRRSDYLGDPQVPLDQAVRDCVQAHTGDRPDGAIRLLTHLRYFGHVFNPVSFYYCFDRHDGLRWIVAEITNTPWQQRHTYVLPVAQARSHRDVHAWRFDKRFHVSPFMGMQHHYDWRFSVPTEHLRVHMDVLDAIDATPQPPAQQARRFDATLVLQRQPLTAGTLARTLLGYPLMTVQVVLAIHWQALRLWLRGNPVHDHPTPPVRERS

SEQ ID NO: 28826 - protein, 110 aa, Xylella fastidiosa Ann-1
MSFAVLGFPSNDFKGQEPGDEQQIQKFCTLTYGVKFPMFQKVHVKGDEVTPLYQRLTQTTGVAPGWNFHKYLIARDGHVVAQFDSRTRPDDPILLEAIKRELAKPVQVVH

SEQ ID NO: 28827 - protein, 208 aa, uncultured archaeon GZfos37B2
MILLYDAADREGETDFMIPARSIRPQDIAEMRIYGGGLLCAVIPDTAAERLGLPFAADILRRLPDLAHLAEGDLHYDTRSSFSLWVNHRDTFTGIPDRDRALTIHKLDEIVESALHGDMVDFSSEFRSPGHVAVLRGAKDLLKERKGQTELSIALAELAGINPVLCICEMLDSETGYALTKEDAKKYAMKNDMVFVEGGEVVSGYEKG

SEQ ID NO: 28828 - protein, 232 aa, Stephanomeria virgata subsp. virgata
GGRYSVCSAVGVLPLSLQYGFPVVEKFLKGARSIDQQFLSAPFEKNIPVLLGLLSVWNVSFLEYPARAILPYTQALEKLAPHIQQVSMESNGKGVSIDGVRLPFEAGEIDFGEPGTNGQHSFYQLIHQGRVIPCDFIGIVKSQQPVYLKDEVVNNHDELMSNFFAQPDALAYGKTPEQLQSENVASHLVPHKTFTGNRPSLSLLLPSLDAYRIGQLLAIYEHRIAVEGFIWG

SEQ ID NO: 28829 - protein, 163 aa, Pseudomonas fluorescens PfO-1
MNHYLTPDLCDAYPELVQVLEPMFSNFGGRDSFGGEIVTIKCFEDNSLVKEQAELKGNGKVLVVDGGGSLRCALLGDMIAEKAAKNGWEGLVIYGCIRDVDVIAQTDLGVQALASHPKKTEKRGLGDLNVPVTFAGVTFHPGQYIYADNNGVIISPSPLKMPE

SEQ ID NO: 28830 - protein, 426 aa, Aspergillus oryzae
MSSISRTANLLFRASRASLLRPRAVNPVQHVLGKDRLAARGTIGHVDHGKTTLTAAITKHQASKGLAQFLEYGAIDKAPEERKRGITISTAHIEFSTEDRHYAHVDCPGHADYIKNMITGAANMDGAIVVVAASDGQMPQTREHLLLARQVGVQKIVVFVNKIDAVEDPEMLELVELEMRELLSSYGFEGEETPIIFGSALCALEDRRPDIGAERIDELMKAVDTWIPTPQRDLDKPFLMSVEEVFSIAGRGTVASGRVERGILKKDSEVEIIGGSFDATKTKVTDIETFKKSCDESRAGDNSGLLLRGIRREDVRRGMIIAAPGSTKAHDQFLVSMYVLTEAEGGRRTGFGSNYRPQVFVRTADEAADLSFPDGDESRRVMPGDNVEMVLKTHRPIAAEAGQRFNIREGGRTVATGLVTRVMDGK

SEQ ID NO: 28831 - protein, 327 aa, Shewanella sp. MR-4
MGHAKRGKVGVLLLNLGTPDAPTASAVRRYLSEFLSDPRVVEIPKLLWMLILHGIVLRVRPAKSAALYQKVWTEAGSPLMDISLRQTAKLSEKLTADGHQVSVHLAMRYGNPSVASTLQTMHQQGIDKLVVLPLYPQYAAPTTGSAFDAIARELTQWRYLPSLHFIHTYHDNPDFITALVNSIRADFEQQGKPQKLVLSYHGMPERNLHLGDPYYCFCMKTTRLVAEQLGLTADEFVMTFQSRFGKAKWLQPYTDATMQALPSEGVRDVAIVCPAFSADCLETLEEIVGENGHIFANAGGEKFRYIPALNDNDDHISMMANLVKPYL

SEQ ID NO: 28832 - protein, 203 aa, Shewanella sp. MR-4
MISILVSDVIENNELANLGAPNEKDIMMKLPLVIFASLLSTSAFAATCPSYLGVEVRKLHSDEKINLCELTQGKPVLLVNTASNCGYTPQFKALEALHKEYKDKGLVVIGFPSDDFFQEENDEKDTAKVCYINYGVTFTMLATSPVRGSDANSVFKYLGDKAGSPKWNFYKYVVSGDGNTVQQFNSKVKPDSAELKQAIESVL

SEQ ID NO: 28833 - protein, 186 aa, Triticum aestivum
MDRLKTSARLMIVSDLDHTMVDHHDSENLSLLRFNALWESNYRHDSLLVFSTGRSPVLYKKLREEKPMLTPDITIMSVGTEITYGNLMVPDAGWVEILNQKWDRSIVIEESKKFPELTLQAETELRPHKVSFYVEKDKAQAVSKALMECFEKHGLDVKIIYSGGMDLDILPQGAGKGQALAYLLKK

SEQ ID NO: 28834 - protein, 302 aa, Prochlorococcus marinus subsp. marinus str. CCMP1375
MTNILDGKKLAKELELRLHEDITEFSPEVGRPPGLAVIRVGDDPASGIYVSNKEKACNRIGLDSFLYHLGTNTSEQEILEVIKALNNDQKVDGILLQLPLPKGLDAEPLLKAIDPEKDVDGLHTLNLGRLLKGEKGPRSCTPAGIMVLLRRNNISLVGKKVVVIGRSILVGKPMALMLQAANATVTVAHSKTINLPEITNQAEVLIVAAGIPQLIGLEHVRSNAVVVDVGIHRIPMEPLKLTGSNYKLCGDVRAEEIYSKIKAITPVPGGVGPMTVAMLMVNTVNRWQYHCGLSSTLSDLLP

SEQ ID NO: 28835 - protein, 425 aa, Brassica napus
  misc_feature (246)..(246): Xaa can be any naturally occurring amino acid
GEKKMQNQRLKQQQQQAMMQQAMMQQQHHSLYHPSLMAPPPPPPQMEPLPSGNLPPGFDPSTCRSVYAGNIHTQVTEVLLQEIFASTGPVESCKLIRKDKSSYGFVHYFDRRSAGLAIMSLNGRHLFGQPIKVNWAYATGQREDTSSHFNIFVGDLSPEVTDAALFESFSAFNTCSDARVMWDQKTGRSRGFGFVSFRNQQDAQTAINEMNGKWLSSRQIRCNWATKGATFGEDKHSSDGKSVAEXLANGSEDGREISITNEEAPENNPQYTTVYVGNLAPEVTQLDLHRLFHTLGAGVIEEVRVQRDKGFGFVRYNTHDEAALAIQMGNSQPFLFNRQIKCSWGNKPTPIGTASNPLPPPAPVAVPGLSPMDLLAYERQLALAKMHPQAQHSLRHANAAGASAAMYDGGFQNVAAAHQQLMYYQ

SEQ ID NO: 28836 - protein, 962 aa, Prochlorococcus marinus str. MIT 9313
MRHIGPSLEDQQQMLLELGHRDLQSFVAAVVPPDILETTAPSSSLPEGCGEVQAMEELRLIAAANRVRRSLIGLGYYGTATPALIQRQVLENPAWYTAYTPYQAEISQGRLEALFNFQTLISELTGLPIANASLLDEGTAAAEAMSLSFAICKRPAAHRFLVDAEVLPQTLAVLRTRAEPLGIDLEVAEPMTFQFDAEVFGVLLQLPGRSGRLWDPTTSIQAAHEVGALATVAIDPLAQVLLAPVAEFGADIAVGSVQRFGVPMGFGGPHAAFFATLEIFKRQVPGRLVGQSVDAEGQPALRLALQTREQHIRRDKATSNICTAQVLLAVMASFYAVHHGPDGLAAIARRVLRLRAQLERGLHQLGYPVQSIARFDTIEVICREAPAVHQAAALAGFNLRVLPLGVAPEAAHGFGISFDELSTDQELKSILQILAEAAGQPVPVLEDPGNPHLEELVGLPLRQRPWLQQQVFHRYRSETELLRYLQRLVGRDLSLVHGMIPLGSCTMKLNAAAELIPISWREFAALHPFAPQDQCQGYQRLVQDLEHWFADITGFAGVSLQPNAGSQGELAGLLVIRAWHHSRGEQQRDVCLIPTSAHGTNPATCVMAGLRVVPVACDADGNVDLNDLASKAEAHAPQLAALMVTYPSTHGVFEPQIREICELVHGHGGQVYLDGANLNAQIGFCRPGTYGADVCHINLHKTFCIPHGGGGPGVGPIAVSAHLMPFLPGHPLAACGGEQGIGAISAAPWGSAGILPISWMYLRMMGAEGLRQASAVALLSANYLAHRLHPHYPVLFRGQAGLVAHECILDLRPLKRSAGLEVDDIAKRLMDYGFHAPTVSWPVAGTVMVEPTESESLEELNRFCDAMIAIREETAAIESGQIDPQNNPLRRAPHTLAAVTAEVWDRPYSRAEAAFPLAEQRQSKFWPAVSRIDNAYGDRNLLCSCPSVEELADNAVLKPPLV

SEQ ID NO: 28837 - protein, 830 aa, Yersinia pestis CO92
MKLSRRDFMKANAAVAAAAAAGMTIPTVAKAVGETTNAIKWDKAPCRFCGTGCGVLVGTQNGRIVASQGDPDSPVNRGLNCIKGYFLPKIMYGKDRLTQPLLRMKDGQYDKEGDFTPISWEKAFDIMELKFKNALKEKGPTAVGMFGSGQWTVWEGYAALKLLKGGFRSNNLDPNARHCMASSVVGFMRTFGMDEPMGCYDDIEEADAFVLWGSNMAEMHPVLWSRMTSRRLTNAHVRIAVLSTYEHRSFELADNPIVFTPQTDLVIMNYIANYIIQNNAVDKDFLAQHVNFRRGATDIGYGLRPTHPLEKAAKNPGSDASEPMSFEDFKTFVAEYTLEKAAKMSGVPEDQLESLAQLYADPKVKLVSYWTMGFNQHTRGVWANNMCYNLHLLTGKISTPGSGPFSLTGQPSACGTAREVGTFSHRLPADMVVTNEKHRQIAETTWQLPAGTIPEKVGLHAVAQDRALKDGTLNAYWVMCNNNMQAGPNINEERMPGWRDPRNFIVVSDPYPTISALSADLILPTSMWVEKEGAYGNAERRTQFWRQQVPSPGEAKSDLWQIVEFAKRFNVEEVWPAELVNQKPEYRGKNLYEVLFANDVVSKYPLSEIPDDQLNDEARDFGFYIQKGLFEEYASFGRGHAHDLAPFDVYHQVRGLRWPVVDGKETLWRYREGFDPFVPKGEEVRFYGKPDGKAVIFALPYEPAAESPDQEYDLWLSTGRVLEHWHTGSMTRRVPELHRAFPEAVLFIHPLDAKARGLHRGDKVKVISRRGEVISLVETRGRNRPPRGLVYMPFFDAAQLVNNLTLDATDPLSKETDFKKCAVKLERVVA

SEQ ID NO: 28838 - protein, 148 aa, marine bacterium P99-3
MEIVLWIVIFLTTFGVMEFNAWWMHKYVMHGFLWYLHEDHHHKKHNSWFEKNDFFFVFYAAVSIALKVAHSEYDLWWALPISAGILAYGIAYFIVHDIFIHQRFKWLRKANNKYAKGLRRAHKIHHKHLGKKDGENFGMLVVPFKYFK

SEQ ID NO: 28839 - protein, 126 aa, Zea mays
  misc_feature (29)..(29): Xaa can be any naturally occurring amino acid
VARNRSSTKFNIQGLVIIGGFEAYTGGLXLMHGRTQFDVLCIPFLVIPATGSNNVPGSDFSVGADTALNTICTICARIKQSAAGTKRRVFIIETMGGYCGYLATMAGLAAGADAAYIFEEPSPFET

SEQ ID NO: 28840 - protein, 1216 aa, Oryza sativa (indica cultivar-group)
MAATAAALAVTDELALPLRAVGDLAAAAGVSREEVVVITQCASLGGKLPFDDASVGSVLAVIKKVENLGDLFITEISRVLKAGGMVLIQSSPSDQDPNNSIQRKLLLGGFVDVQASAASSQDSEHSVTIKAKKVSWSMGSSFPLKKATKGLPKIQIDDDSELIDEDSLLTEDDLKKPELPVVGDCEVGATRKACKNCTCGRAEAEEKVEKLNLTSEQINNPQSACGNCGLGDAFRCGTCPYRGLPAFKPGEKEIDFGAPVVLGQEIDFASVMTSLPDRGVSSSSSDPLCEGNIAPCSSSSEQKEDCSLKQSKTSILSCVFNSPFNIFEAHQDSSANKSPKSSSGSYDWLRVLRRIVCSGSMWRFLGTSKVLTSSDVWFLGKCYKLSSEESSSDSDSESGHATFLEDFSSRIWITYRRGFDAISDSKYTSDVNWGCMVRSSQMLVAQALIFHHLGRSWRRPSEKPYNPEYIGILHMFGDSEACAFSIHNLLQAGNSYGLAAGSWVGPYAMCRAWQTLVRTNREQHEVVDGNESFPMALYVVSGDEDGERGGAPVVCIDVAAQLCCDFNKGQSTWSPILLLVPLVLGLDKINPRYIPLLKETFTFPQSLGILGGKPGTSTYIAGVQDDRALYLDPHEVQMSATVIIWLFLQYPFYAWNPFCYGSYSGVFSTSQAVDIAADNIEADTSSYHCSTVRDLALDLIDPSLAIGFYCRDKDDFDDFCSRATELVDKANGAPLFTVVQSVQPSKQMYNQDDVLGISGDGNINVEDLDASGTDAGGVGVTYGMRGTNMPPPADVARFLSRDTIFDRVRLLDADPRALRAFAGTGLAVDVTVPNADVPRLAASRASARRWVRASVAPYAEATNVSRVLVGDEVISQANRTLLLSLVPAMRNLHAALAAVLPPSPRRREIIKVSTPHSLGILAASTPPSAGRFHDGYDTAVVKPLLGFLRATGAPFMVNAYPFYGGLTNDTLDYALFRVNDGVTDDATGLLYANMLDAQLDAVHSAMRRLGFGDVDVVVSGTGWPSAGEYWEVGAGADLARNYNKNAIRHLGSGVGTPLMPNRTFELSIFSLFDENLKPGPVSERNFGLYHADMTPVYDAGILTAPQEIVGTKVTPAPAPALAPAADGRRRWCVPKPAADEVALQVNIDFVCGQGGIDCGAIRAGGSCYDPNNVQAHAAFAMNLYFQSNGQHEFDCDFGQTGVITTVDPSYKSCKFT

SEQ ID NO: 28841 - protein, 257 aa, Mycobacterium avium subsp. paratuberculosis K-10
MAALNEFVSVVVSDGSRDAGLAMLLVSRPPTNALSRQVYREVIAAADELGRRDDVAAVILFGGHEIFSAGDDMPELRTLRGAEAETAARVRRDAIDAVAAIPKPTVAAITGYALGAGLTLALAADWRISGDNVKFGATEILAGLVPGGDALARLTRVAGASKAKELVFSGRFFDAEEALALGLIDEMVAPDDVYDAAAAWARRFLDGPRHALAAAKAGVDAVFELPRAERLAAEQRRYVEVFSAGQGGDAGADPHGG

SEQ ID NO: 28842 - protein, 450 aa, Kluyveromyces lactis NRRL Y-1140
MEFLSRISQHLGIVEDVDRDGTVFILGKEYAPLNNKSRTDVETDDSALESLINIVSLNPGLLSDVHSRVFFTYRTQFTPIRRNENGPSPINFTLFFRDNPINTLENALTDPDSFYSDIGWGCMIRTGQALLANAIQRVKLAREFRINASRIDDNELNLIRWFQDDVKYPLSLHNFVKAEEKISGMKPGQWFGPSATARSIKTLIEGFPLCGIKNCIISTQSADIYEDEVTRIFHKDRDANLLLLFAVRLGVDKINSLYWKDIFKILSSPYSVGIAGGKPSSSLYFFGYQNENLFYLDPHNTQQSSLMMDDLEFYRSCHGHKFNKLHISETDPSMLLGMLISGKNEWDQFHTYFRDSQIIQFLTTRPENDLYQSANMSVGSDSIHSLESDIQDTGEYVDVGTLVSGKQMSSPQPKDEEFEDVKCKSQRIIVCEDPADPEVEQVLVEDSSSC

SEQ ID NO: 28843 - protein, 153 aa, Zea mays
MADEEKLPPGWEKRMSRSSGRVYYFNHITNASQWERPSGNSSSGGKNGQGEPARVRCSHLLVKHSQSRRPSSWRQEKITRTKEEALELINGYIQKIKSGEEDFESLASQFSDCSSAKARGDLGAFSRGHTVLEADSRAELFLVRPRSSVQSQR

SEQ ID NO: 28844 - protein, 487 aa, Triticum aestivum
  misc_feature (400)..(400): Xaa can be any naturally occurring amino acid
  misc_feature (431)..(431): Xaa can be any naturally occurring amino acid
  misc_feature (440)..(440): Xaa can be any naturally occurring amino acid
MECVRSGALDLGRSGNFLGKSGSTTSCGKVRCSTNLAGSTKCEQNLHGKVKPLLLSASGKARGTSGLVHRSPVLKHQHHLSVRSTSTDVCTTFDEDVKGVSSHAVEEKVGVLLLNLGGPETLNDVQPFLFNLFADPDIIRLPRLFRFLQRPLAKLISTFRAPKSKEGYASIGGGSPLRKITDEQANALKVALKSKNLEADIYVGMRYWYPFTEEAIDQIKKDKITKLVVLPLYPQYSISTSGSSIRVLQNIVKEDQYFAGLPISIIESWYQREGYVKSMADLIEKELSVFTNPEEVMIFFSAHGVPLTYVKDAGDPYRDQMEDCIALIMEELKSRGTLNDHTLAYQSRVGPVQWLKPYTDEVLVELGQKGVKSLLAVPVSFVSEHIETLEEIDMEYRGVXLLSLGIENWGTVPSSWVALHPFFSDLADAVXVEALPSASXMATRKVKDTDSDMDMMHYLTKMFFGSVLAFFLLLSPRLVSAFRNTLH

SEQ ID NO: 28845 - protein, 187 aa, Cryptococcus neoformans var. neoformans JEC21
MLAAKNCLNKSLRALRPLTERSASPVIARSARASPLLRSRATSARTFVTSLPRQSQPLPPPPTSTLSHDEYEHVSERDMETLNESLEIFCEDFGNGNWEIEYSSGVLNLTLPPYGTYVLNKQPPNLQIWMSSPVSGPSRFEYINGSWVHHRKEGVKLGELLSGELKEILEKSGNEAAAGVWEGVGLP

SEQ ID NO: 28846 - protein, 166 aa, Arabidopsis thaliana
MGLVFLTVFMAVMSSTMVSAQSSCTNALISMSPCLNYITGNSTSPNQQCCNQLSRVVQSSPDCLCQVLNGGGSQLGINVNQTQALGLPRACNVQTPPVSRCNTGGGGGGSTSDSPAESPNSSGPGNGSKTVPVGEGDGPPSSDGSSIKFSFPLIAFFSAVSYMAIF

SEQ ID NO: 28847 - protein, 164 aa, Methylococcus capsulatus str. Bath
MNIYEFEVRTLEGETVRLDGYRGKVLLIVNVASRCGFTPQYAGLEALYRRHRNAGLVILGFPCNQFGGQEPGSETEIRRFCSSRYEVSFPLFAKIEVNGEHTHPLYAYLKSAQPGLLGSEAIKWNFTKFLVGRNGEVVKRYAPTATPESIEPGLLPLLTVGSGG

SEQ ID NO: 28848 - protein, 313 aa, Idiomarina loihiensis L2TR
MTQRVRIATRKSKLALWQAEHIQQRLEELHPGLSVELVPMSTKGDVILDTPLAKIGGKGLFVKELEVAMLEGRADIAVHSMKDLPVEFPPGLELHTICEREDPRDAFVSNNYKNLNELPEGAVVGTCSLRRRCQVKEQFPHLVIKDLRGNVQTRLRKLDEGEFDAIILAASGLIRLELGDRITSFIPVEQSLPANGQGALGIECRSDDDEMKALLAPLQCQETRTRVLAERAMNRGLDGGCQVPIGAYAELEGDEVYLRGLVGEPDGGKVLRDEVRGPASKAEELGSELAERLLKQGAAEILSAVYDSESSHS

SEQ ID NO: 28849 - protein, 230 aa, Zea mays
MAVPEVVVDGVVFPPVARPPGSAGSHFLGGAGVRGLEIGGNFIKFTAIGVYLEDAAVPALAKKWGGKTADELASDAAFFRDVVTGDFEKFTRVTMILPLTGEQYAEKKVTENCVAFWKAAGLYTDAEGVAVEKFREVFKPDTFAPGASILFTHSPAGVLTVAFSRDSSVPGAGGVAIDNKLLCEAVLESIIGEHGVSPAAKLSLAARVSELLTKGTAAAALRAEPVSVTA

SEQ ID NO: 28850 - protein, 535 aa, Cryptococcus neoformans var. neoformans B-3501A
MPDPAPFWLCHECGAQMRPVTVDGTPHCASCNGEFIEILDPEVNPDPDYELPPPPPTRPGQQTPSRFDPHFLSNFPPPPQSEGSSSPARQRDTNNTGNFLSSLFSMLGTGSRQGSEETPRRPPPSFHGEPSASQRNGQSQNTDRPGMRTYAFNFGNARGSVTIGSFGSNLGRQGYRMNNDPTSPSGNLFNDPDPFRADPFDARFRPPGDGNRDINGDMPLPLGANEALQLIAALLDGNPPPNMGNLGDFATSDADFMRILQETFMEAAGPQGPVPANETVIEGLPRFTFDSGSLAKSQFRDCPVCKDDFEIGNEVMLIPCGHIYHPDCLVPWLRQNGTCPVCRFSLVSEDEQPNNQRTTNVGTEHTRNAEEERPATPTIPAAVSNFFRNLFGGSESQPPTPRAAAGGGHGSNASQDPHSSVNVVSESTISADASSRHSPTIHGATRREQVQQCDEVASEGSSNDSLVRVYPEHSSGETHGDDATNGEAGRIAEQEQQVASRDRLADRVNRDFNERWQRLRREREEDDTVYHPDLD

SEQ ID NO: 28851 - protein, 467 aa, Listeria innocua
MLYSENDKRKHESYRIPLFGSEEESTSIPKYVLKKEPMEPRIAYQLVKDQLMDEGNARQNLATFCQTYMEKEAEILMAETLEKNAIDKSEYPQTAELENRCVNILADLWNAPKEMSYLGTSTVGSSEACMLGGLAMKFRWRNNAEKRGLDIQAKRPNLIISSGYQVCWEKFCVYWDVDMRVVPMDKEHLSLDVEKVFELVDEYTIGIVGILGITYTGKFDDIALLDEKVEAYNEANEHQLVIHIDGASGAMFTPFVNPELPWDFRLKNVVSINTSGHKYGLVYPGVGWILWKDKEYLPKELIFEVSYLGGSMPTMAINFSRSASQIIGQYYNFLRYGFEGYREIHEKTKKTALYLSKTVEKSGYFEIINDGSNLPIVCYKLKDDLDVEWTLYDLADQLLMKGWQVPAYPLPADLSDTIIQRFVCRADLGYNVAEEFAADFADALHNLEHARVLYHDKERNDSYGFTH

SEQ ID NO: 28852 - protein, 157 aa, Heliobacillus mobilis
MMIKIAPSILSADFSNLGSQVADVEAGGAEYLHIDVMDGHFVPNITIGPLVVASLRPRSQMVFDTHLMIEEPDRYIPDFIKAGSDLVTVHQEACTHLHRTVSLIREKGAKAGVALNPATSWQSLEYVLPMVDLVLVMSVNPWFWRSKVYQRRLAEDH

SEQ ID NO: 28853 - protein, 823 aa, Pseudomonas fluorescens PfO-1
MLPENLMKKLKLVMIGNGMAGVRTLEELLKLSNELYDITVFGAEPHTNYNRILLSPVLAGEQTFEEIVLNDLDWYLENNIKLLLNRKVVEIDRVKRRVIAEDGTEAEYDRLLIATGSTPFILPIPGNTLQGVIGYRDIADTQAMIDTAKTHKHAVVIGGGLLGLEAANGLMLRGMHVTVVHLGEWLLERQLDKTSGQLLQTALESRGLHFRLCEQTQALHDAGNGRVGSVQFKNGDIIPADLVVMAAGIRPNTELAEKAGIPCNRGILVNDTLQTYDPRIYAIGECASHRGIAYGLVAPLFEQAKVCANHLAQLGFARYQGSVTSTKLKVTGIDLFSAGDFMGGEGTETITLSDPIGGVYKKLVIKDDVLVGACLYGDTADGGWYFRQIRENHAIGEIRDHLMFGENALGDVGHQGQDKAMSMADNAEVCGCNGVCKGTIVKAIQEHGLFSVDEVKKHTKAASSCGSCAGLVEQILINTVGGAADVKPKSEKAICGCSDLNHGQIRQAIREQHLLTIAGTMSYLNWRTPNGCATCRPALNYYLISTWPGEAKDDPQSRLINERAHANIQKDGTYSVVPRMWGGVTNPSELRRIADVADKYQVPMVKVTGGQRIDLLGIKKQDLPGVWKDLDMPSGHAYGKSIRTVKTCVGSEFCRFGTQNSTQLGIDLEHDLFNMWSPHKVKLAVSGCPRNCSEAGIKDVGIIGVDSGWEMYIGGNGGIKTEVAEFFVKLKTAEEVREYNGAFLQLYREEAFYLERTVHYLQRVGMEHIKKAVLEDPERRKALNERLQFSLSFEQDPWKERLAQPQLKKEFDVLPVKNLEVPA

SEQ ID NO: 28854 - protein, 345 aa, Thermus thermophilus
MKVAVLPGDGIGPEVTEAALKVLRALDEAEGLGLAYEVFPFGGAAIDAFGEPFPEPTRKGVEEAEAVLLGSVGGPKWDGLPRKIRPETGLLSLRKSQDLFANLRPAKVFPGLERLSPLKEEIARGVDVLIVRELTGGIYFGEPRGMSEAEAWNTERYSKPEVERVARVAFEVARKRRKHVVSVDKANVLEVGEFWRKTVEEVGRGYPDVALEHQYVDAMAMHLVRSPARFDVVVTGNIFGDILSDLASVLPGSLGLLPSASLGRGTPVFEPVHGSAPDIAGKGIANPTAAILSAAMMLEHAFGLVELARKVEDAVAKALLETPPPDLGGSAGTEAFTATVLRHLA

SEQ ID NO: 28855 - protein, 307 aa, Carboxydothermus hydrogenoformans Z-2901
MERYDVIIIGAGPAGLSAALYSARSKLSTLYIEKLSTGGQAATTDEIENYPGFAHGISGPELTAQMEEQAKRFGAKKLLAEVKGIELAGADRIVKTTKGNFVAKVVIIASGAAPKLLGCPGEQEFRSRGVSYCATCDAAFYEGANVMVVGGGDSAVEEACYLTKFADKVTLVHRRDTLRATKVLQERAFANEKLEILWNTVVEEIIGTDVVEKVRLKNVVTGEVFEREIDGIFIYVGLKPNTEFVKGLVNLDEQGYIITDENMRTNIPGIYAAGDVRQKLLRQVVTAAADGAIAAYHAEKYLEECTE

SEQ ID NO: 28856 - protein, 133 aa, Brassica napus
TFFAASETLELLENVGAVSDFSGKARLFLVLPVAVLDAFFIIWIFKSLSATFKKLQTRRLLVKLDVYRKFTNALAVAILVSVGWICYELYFKSKDVYNEHWQNAWIIPAFWQLLSFSLLIVICSLWAPSQNST

SEQ ID NO: 28857 - protein, 500 aa, Arabidopsis thaliana
MVLSKTASKSDDSIHSTFASRYVRNSISRFEIPKNSIPKEAAYQIINDELKFDGNPRLNLASFVTTWMEPECDKLMMESINKNNVEMDQYPVTTDLQNRCVNMIARLFNAPLGDGEAAIGVGTVGSSEAVMLAGLAFKRQWQNKRKALGLPYDRPNIVTGANIQVCLEKFARYFEVELKEVKLREGYYVMDPDKAVEMVDENTICVVAILGSTLTGEFEDVKLLNDLLVEKNKKTGWDTPIHVDAASGGFIAPFLYPDLEWDFRLPLVKSINVSGHKYGLVYAGIGWVVWRTKTDLPDELIFHINYLGADQPTFTLNFSKGSSQVIAQYYQLIRLGFEGYRNVMDNCRENMMVLRQGLEKTGRFNIVSKENGVPLVAFSLKDSSRHNEFEVAEMLRRFGWIVPAYTMPADAQHVTVLRVVIREDFSRTLAERLVADFEKVLHELDTLPARVHAKMASGKVNGVKKTPEETQREVTAYWKKFVDTKTDKNGVPLVASITNQ

SEQ ID NO: 28858 - protein, 346 aa, Rickettsia conorii str. Malish 7
MLGYMKKRIAIVLFNLGGPKNLKSVKPFLFNLFYDKAIINLPNPLRYIIAKIISITREKKSQKIYSLIGGKSSLLQETEEQKLALTEKLKQLIKEDFAIFINMRYSAPFAKEVIGQIKKYNPSEIILLPLYSQFSSTTTGSSVKNFLQNLDIDIPIKTICCYPLEKDFIKAHVSLIKEKLYDKNFRILFSAHGLPEKIIKAGDPYSFQIKETVQAIVKELNIKDLDYKITYQSRVGPIEWLKPNTEDEIELAGKLKKDIIIVPISFVSEHVETLVELDIEYKLIADKYEIQYIRIPTLGTNKIFINSLTNILLRFINKVDTNLVMSSSSTRICPNEFTKCLCKLTS

SEQ ID NO: 28859 - protein, 218 aa, Cichorium intybus
MNAAATSRALPGVKLSKLTSSKFNHNSSVVSFHRKAQVSLCSHTHAIKCEASGNSSLAGKTFCSVGICTQPLSDIESDSHVEEEKVGVLLLNLGGPETLLDVQPFLYNLFADPDIIRLPRLFRFLQRPLAQIISVLRAQKSKEAYASIGGGSPLRKITDEQAHALKSELEAKELPANVYIAMRYWHPFTEEAAPQIKKDGIPKLVVFAPLPSIFYFTT

SEQ ID NO: 28860 - protein, 107 aa, Prochlorococcus marinus subsp. marinus str. CCMP1375
MSSAAAVTDSSFEQEVLQSDLPVLVDFWAPWCGPCRMVSPIVDEISKDFEGKIKVCKLNTDENPNVASQYGIRSIPTLMIFKGGQKVDTVVGAVPKATLSGTISKHL

SEQ ID NO: 28861 - protein, 336 aa, Neisseria meningitidis serogroup B
MLPFFPEPSLSYTQQNRTAVLLLNLGTPDAPTAQAVRPYLKSFLTDRRVVELPKWLWYPILHGLVLTLRPKKSAHAYEKIWFKEGSPLEVYTARQAAALAKRMPDLIVRHAMTYGNPSVADVLSELKAQGAGRLLVIPMYPQYAASSSGAAVDKVCEQLLLQRNQMSVRTVSRFYDDTGYIDAMKNHILRYWAEHGRGKKLMLSFHGVPQKHHDLGDPYPDECRHTAKLLAEALELTEDQYVVSFQSQFGRAKWVTPSTQDLFGKLPKQGVTELDVFCPGFLADCLETMEEIALMGREQFYEAGGKSYRYIPCLNDNPDWIDALVALAEENLGSWR

SEQ ID NO: 28862 - protein, 477 aa, Salmonella typhimurium LT2
MSTSDSCYNTGYILRICAIAALGGILFGYDTAVISGAIGSLTSYFHLSPAETGWAVSCVVVGCVIGSFSAGYLSKRFGRKKSLMVSALLFTISAVGTSLSYTFTHFVIYRIIGGLAVGLAATVSPMYMSEVSPKNMRGRALSMQQFAIVFGQILIFYVNYKIASIAADTWLIELGWRYMFAAGIIPCILFCILVFLIPESPRWMMMIGREEETLKILTKISNEEHARHLLADIKTSLQNDQLNAHQKLNYRDGNVRFILILGCMIAMLQQVTGVNVMMYYAPIVLKDVTGSAQEALFQTIWIGVIQLIGSIIGAMIMDKMGRLSLMRKGTIGSIIGLLLTSWALYSQATGYFALFGMLFFMIFYALSWGVGAWVLISEIFPNRMRSQGMSISVGFMWMANFLVSQFFPMINENPYLLSHFHGAFPMWIFAICCIFSYFFICRYLPETKGISLEKMESVVLAKRRKKLQPIQTERYSD

SEQ ID NO: 28863 - protein, 478 aa, Salmonella typhimurium LT2
MSQRSKYNSAYVYVLCCIAALAGLMFGYSTAVITGVVLPLQQYYQLTPTETGWAVSSIVIGCIIGALVGGKIADKLGRKPALLIIAIIFIASSLGAAMSESFMIFSLSRIVCGFAVGMAGTASTMYMSELAPAEIRGKALGIYNISVVSGQVIVFIVNYLIAKGMPADVLVSQGWKTMLFAQVVPSIAMLAITLFLPESPAWCARNNRSEARSIKVLTRIYSGLTATDVAAIFDSMKETVRSQDNVAGGERTNLKSSPVLRYILLVGCCIAVLQQFTGVNVMNYYAPLVLQNSSTEVVMFQTIFIAVCNVVGSFIGMILFDRYGRIPIMKIGTIGSIVGLLIASYGLYTHDTGYITIFGILFFMLLFAVSWSVGAWVLISEVFPEKIKGFGMGLAVSLMWIANFLISLLFPVINDNAWLQETFGGAFSMWIFVVFNLVCYVFISRYVPETKGVPLTEIERLAENKLREIQGKRRDVIA

SEQ ID NO: 28864 - protein, 446 aa, Arabidopsis thaliana
MSEFDKHVQNHIKNEKPFNSIKPSEIDSTLSLSDSLLLKIIEKLPESQSNDVSLVCKRWLNLQGQRLRSLKLLDFDFLLSERLTTRFPNLTHVDLVNACMNPRVNSGILFCHKSISFHLSSDSSNWEFLEENLLHSDVIDRGLRILSRESFDLLNLKVINASELGLLSLAGDCSDLQELELHKCNDNLLHGIAACKNLKGLRLVGSVDGLYSSSVSDIGLTFLAQGCRSLVKLELSGCEGSFDGIKAIGQCCEVLEELSICDHRMDDGWIAALSYFESLKILRISSCRKIDASPGPEKLLRSCPAMESLQLKRCCLNDKEGIKALFKVCDGATEVNIQDCWGLSDDCFSLAKAFRRVRFLSLEGCSVLTSGGLESVILHWEELESMRVVSCKSIKDSEISPALSSLFSLLKELTWRPDTRSHLSSSLEGAGIGIRGSKFFKKSVLH

SEQ ID NO: 28865 - protein, 595 aa, Arabidopsis thaliana
MAKLNRSNIGLSLLLSMFLANFITDLEASSHQDLNQPYRTGYHFQPLKNWMNDPNGPMIYKGIYHLFYQYNPYGAVWDVRIVWGHSTSVDLVNWISQPPAFNPSQPSDINGCWSGSVTILPNGKPVILYTGIDQNKGQVQNVAVPVNISDPYLREWSKPPQNPLMTTNAVNGINPDRFRDPTTAWLGRDGEWRVIVGSSTDDRRGLAILYKSRDFFNWTQSMKPLHYEDLTGMWECPDFFPVSITGSDGVETSSVGENGIKHVLKVSLIETLHDYYTIGSYDREKDVYVPDLGFVQNESAPRLDYGKYYASKTFYDDVKKRRILWGWVNESSPAKDDIEKGWSGLQSFPRKIWLDESGKELLQWPIEEIETLRGQQVNWQKKVLKAGSTLQVHGVTAAQADVEVSFKVKELEKADVIGPELDPIPQKICSQGDLSVMSGLGPFGLMVLASNDMEEYTSVYFRIFKSNDDTNKKTKYVVLMCSDQSRSSLNDENDKSTFGAFVAIDPSHQTISLRTLIDHSIVESYGGGGRTCITSRVYPKLAIGENANLFVFNKGTQSVDILTLSAWSLKSAQINGDLMSPFIEREESRSPNHQF

SEQ ID NO: 28866 - protein, 314 aa, Lycopersicon esculentum
MAAGISASASSRTIRLRHNPFLSPKSASTAPPVLFFSPLTRNFGAILLSRRKPRLAVCFVLENEKLNSTIESESEVIEDRIQVEINEEKSLAASWLAEKLARKKSERFTYLVAAVMSSLGITSMAILAVYYRFSWQMEGGEVPFSEMLATFTLSFGAAVGMEYWARWAHRALWHASLWHMHESHHRPREGPFEMNDVFAITNAVPAIGLLSYGFFHKGIVPGLCFGAGLGITVFGMAYMFVHDGLVHKRFPVGPIANVPYFRRVAAAHQLHHSDKFDGVPYGLFLGPKELEEVGGLEELEKEVNRRIKISKGLL

SEQ ID NO: 28867 - protein, 501 aa, Salmonella typhimurium LT2
METVGNFIHGKTTLSSSGETLPVTNPATGKVIRQVTQSTREEMLAAIQSAHEAFPAWSKMTPLRRARILFEFKVLLEKHRDELAALIVSEHGKVWSDALGELTRGIEVVEFACGIPHLSKGEYSFNVGSGVDSFSLMQPLGVVAGITPFNFPAMVPMWMFPVALACGNTFVLKPPALVPSASLRMAQLLQEASLPDGVFNVVHCGNEAASLLTSDPRVQAVSFVGSSAVAEHIYTTASAHGKRVQAFGAAKNHAIVMPDADLDATVNAIMGGAFGSAGERCMALPVVVAVGDETADRLIERLKPLIAALRIGPGELRGKDENEMGPVVSRAHQQKVLGYIDKGVSEGATLVMDGRNYSVAGYPEGFYVGGTLFDNVTPEMTIWREEIFGPVLGIVRVPDYATAISTVNSHEFGNGSVIFTTNGHYAREFAQSVEAGMVGINIPVPVPMAFHSFGGWKRSVFGALNVHGPDGVRFYTRMKTVTSRWPNGQQIVSEFSMPTLG

SEQ ID NO: 28868 - protein, 878 aa, Pseudomonas aeruginosa UCBPP-PA14
MPEIDARLREDVHQLGELLGDTIREQYGPRFLDKIELIRKGAKAARRGSAEGAQQLTATLDGLEEDELLPVARAFNQFLNLANIAEQYHRIRRRRPNEPEPFENLVLEELLGRLKDAGHAPGQLARQLAGLEIELVLTAHPTEVARRTLIQKYDAITAQLAAKDHADLLPEERSRIQQRLQRLVAEAWHTDEIRKVRPTPVDEAKWGFAVIEHSLWQALPNVLRHVDEVLLRSTGERLPLTAAPLRFASWMGGDRDGNPNVTASVTREVLLLARWMAADLYLRDIDRLAAELSMQQASPQLLARVGDSAEPYRALLKQLRERLRVTRNWTHQALAGEVPAAEGVLEHNRDLVEPLQLCHESLHACGMGVIADGALLDCLRRAATFGLFLVRLDVRQDSARHAAALSEITEYLELGSYDEWDEKTRLEFLLEELNSRRPLLPAHYQPSADTAEVLATCRAIAAAPPASLGSYVISMAGQPSDVLAVQLLLKESGVDWPMRVVPLFETLDDLDNAGPCMERLLTLPGYRSRLSGVQEVMIGYSDSARDAGTLTAAWAQYRAQEKLVEICRQQEVELLLFHGRGGTVGRGGGPAHAAILSQPPGSVAGRFRVTEQGEMIRFKFGLPDIAEQNLNLYLAAVLEATLMPPPAPEPAWRAQMDRLAKDALLAYRRVVRDDPQFVEYFRLATPEQELGRLPLGSRPAKRREGGVESLRAIPWIFAWTQTRLMLPAWLGWETALLNAIERGEGALLGQMREQWPFFTTRIDMLEMVLAKADADIARLYDERLVPLELRPLGRRLRDLLSQAVRVVLGLTGQSLLLAHASETRESISVRNSYLDPLHLLQAELLARSRRCQGDACGGLEQALLVTVAGVAAGLRNTG

SEQ ID NO: 28869 - protein, 295 aa, Thermoplasma acidophilum
MITIRIGTRPSRLAVRQAEIVASAIRHAGYEVEIVKYRSEGDSDLKSPLYSIGKTGVFVERLNSLILSGDIDAAVHSAKDIPYEIDRRLRISAVMPRGRFEDALVSENPLSKLPPGSVIGTSSLRRRYQILYQRKDVKVSNIRGNVDTRIEKMRSEGMAGIVMALAAIDRLELNLRYWPFDPEKFVPAPNQGIIAVVSEDGSKASEVLSSINDADTYDDMMAERSITQGLKLGCSTPVGILSRHTGKGMRILAQFFAMDGSDMMMFDQHVDGLDDVDGIVSYIRENLPEEYGYKL

SEQ ID NO: 28870 - protein, 119 aa, Zea mays
MAFASKIITCLLILTIYIAAPTESHITCGTVTSTMTQCISYLTNGGPLPSSCCVAVKSLNQMAQTTPDRRQVCECLKSAGKEIKGLNIDLVAALPTTCGVSLSYPIGFNTNCDSISIAV

SEQ ID NO: 28871 - protein, 401 aa, Guillardia theta
MQEDMEYNIRFVGSYILDKTLGVGATGKVKLAKHSRTKEKVGVKIIKKDLFYDKPSLRLKIQREISVMKLMFHPHVIKIYDVLEDSKYLFLIIEYASKGELFNYLVEKRKLENREALKFFHEIISGLEYCHKHRICHRDLKLENILLDMKLQIKIADFGMASLSIPNIMLKTFCGSPHYASPEVVSNEPYNGIKADIWSCGIILYALVVGKLPYDEENDNMRKLFNKIRFEPPRIPRIIHPDCRDLIRALLTINPQKRITIDKIKKHPWYKSSPLPESCRISIQNLSFASVQNPISNPDPEIISFLLPLQLVKDKKTLCGILSTKKPSFLRVLYRQLEWRKMKMDSVRSNLINEANFKRKKLFKQGKLGNITGLKYWKNLKCKFLSINIKSFVRTGIYIYF

SEQ ID NO: 28872 - protein, 361 aa, Burkholderia vietnamiensis G4
MSDSTYRIAVIPGDGIGREVMPEGLRALAAVTARFGIRFEFEQIDWASCDYYAQHGKMMPDDWKAQLSDVDAILFGAVGWPATVPDHISLWGSLLKFRREFDQYINLRPARLFDGVPSPLAGRKAGDIDFMIVRENTEGEYSSVGGTMFEGTEREVVMQQSIFTRHGTERVLKFAFELAQRRAKRLTVATKSNGIAISMPWWDARAAEMAERYPDIAVDKQHIDILCARFVLQPDRFDVVVASNLFGDILSDLGPACTGTIGIAPSANLNPDRTFPSLFEPVHGSAPDIAGQYIANPIAMIWSAAMMLDFLGNGAGREREAHDAIVAAIEDVLRNGPRTRDLGGQAATQEVGEAIAARIAG

SEQ ID NO: 28873 - protein, 518 aa, Buchnera aphidicola (Schizaphis graminum)
MNSQVIIFDTTLRDGEQALQASLSVKQKLQIALSLENAGIDIIEVGFPISSPGDFKSVQTISKNIKNSRICSLARCLNKDIDTAAEAMSSSNTFRIHIFLATSTLHMESKLKKNFDQIIDMAISSVKRALRYTDDVEFSCEDASRTTMDNLCRIVEQLIKAGVKTINIPDTVGYTVPNELSTIIHNLFKRVPNIDQSIISVHCHNDLGMAVGNSISAIQAGARQIEGTINGIGERAGNTALEEVIMAIKVREDILGVSTNIKHKEIYRTSQIISQICNLPIPPNKAIVGSNAFAHSSGIHQDGVLKNRKNYEIMEPSSIGLKEVKLNLTSRSGRAAVKYYMTQMGYKECDYNIDELYTSFLKLADKKGQVFDYDLEALAFINMQQEESEYFSLSFFSVQSISNGLSTASVKLLCGKKVSIESATTSNGPIDAIYQALNRITNFPITLQKYQLVAKGKGRDALGQVDILVEYKKRKFHGVGLATDIIESSAQAMVNVLNNIWKANQVNEKLKTLKKVNN

SEQ ID NO: 28874 - protein, 617 aa, Thermoplasma acidophilum
MFVMEKVLFPFSAVVDEDDLKMALILNAIDQRIGGVLIMGPKGVAKSTIARSLTDLLPDIDVVKDCPFKCDPHDPSSMCDECIKKYRDGTIVSEKRKIPFVNMPVTATLDRVVGSLDIKRAIDEGLRALQPGLLAEANRGIIYIDEVNLLDDSVVDSILDSAASGINVVEREGVSVTHPARFILIGTMNPEEGDLRPQLKDRFGLSVTAVQPSDPEELIEISNRVEEFDRDPEAFRRKYEKIQNEIRNRIMRARSLLPSVVIDEDLKRFIAEVVIKLQAGNRAMITAVKASKAIAAFNGRDRVNIDDVKEALNLVLKHRVKDSAMIRGTIEKESRDLSTRSVEAGPHSGYEEGSESSGRRDMKAGNGKDEEKDVEVSAAFDEESNRSGRTGNADIFRILDQNRPGDHFDYRASLVNMIMNGRRRMKYEDLAFVSSRSRASIPVILAVDASRSMETMHRIALARGIARSFLHSAYRMRVKLSYITFYGTESHLMVEPTRNLDLIDREISRTVPQGKTPIPAALKMMYDISSRYRQRTVSIMITDGRANVPLGNDVTHDVREWSAKLGTRSDLFLISSTMGSERFMPSYNEDICRYSGGQLIEMDGNGHIALYSGYRRY

SEQ ID NO: 28875 - protein, 363 aa, Buchnera aphidicola (Schizaphis graminum)
MKKKFRIAVLPGDGIGPEVMREAYKILNILERKFFLKLELREFDIGGIAIDREGIALPEKTLRGCENSDAILFGSVGGKKWDYLPIESRPERASLLPLRKHFNLFSNLRPAKLRVDLKNLSPLRSDIVRDGFDILCIRELTGGIYFGKPKGRFKNKNGEYAFDTEIYYDFEIERIANLAFELASSRRCKVCSIDKANVLESSVLWREIVKKVSKNYPDVHLSHLYIDNACMQIIKNPTQFDILLCSNIFGDIISDECAMITGSIGMLPSASLNNQKFGLYEPAGGSAPDIEGKNIANPIAQILSLSMLIRYSMNLNEIADKIDLSVHYALKEGYRTLDISDGKNYIKTNEMGDIIAEFLDNGK

SEQ ID NO: 28876 - protein, 613 aa, Thermoanaerobacter tengcongensis MB4
MCGIAGWVNFNMDLSLQNEVIEKMTDTLKKRGPDGSGVWLSKHCVLGHRRLIVIDPQGGIQPMIKKYGEKNFVIIHNGELYNMDELKNELISLGYTFNTRSDTEIILTSYIEWGPLCVKKFNGIFAFAIWDEVQNRLFIARDHLGIKPLFYTIKNGSLIFGSEIKAILAHPHVKPEIDSQGLAEIFVMGPSRTPGCGVFKDIKELKAGHYLIFTKNGVNISKYWSLQSLPHEDSLEKTAEKIRYLLKDSSVRQLVSDVPLCSLLSGGLDSTAVSFFANEELKQKGHKLITYSVDYVGNDKYFTPNEFQPNSDADWVKFVANKLDTDHNYVFIDNEELAHALKPALYARDLPGMADIDSSLYLFLKEVKKGATVALSGEGADEVFGGYPWFRNKESIRSHTFPWTRMVNERMKLLLPEVVNYIRPLEYLNDRYNEALNEVPKLNGEDPYNARMREMFYLNITRFMPMLLDRMDRMSMAVGLEARVPFLDYRLVEYVWNIPWEMKNLNNREKGILRYALKGYIPDEVIERKKSPYPKTHNPVFKNIVKKWLKQIINDSTSPLLQLVDKKAIAELIETDAKAYDPAWFSQLMGSPQLFAYLVQINMWLKDYKISIV

SEQ ID NO: 28877 - protein, 635 aa, Geobacillus kaustophilus HTA426
MCGFIGCIHDRPRAIEQTWKTTLVEMNRLITHRGPDDEGYFFDDYVSFGFRRLSIIDLEAGHQPLSYENDRYWIIFNGEIYNYLELREELAAKGYSFATHSDTEVIVALYSAEKEKAVEKLRGMFAFVIWDKQEKTVFAARDPFGIKPFFYAEQGDRTFFASEKKSILLALRQESPNGDSLQHYLTFQYVPEPLTMSAGIYKLEPGHYLKKKVGKPLTIHRYWKASFEPIRQSEEELVKKIRDALFDSVNVHMRSDVPVGAFLSGGIDSSFIVAIAKQFHPHLKTFSVGFEREGFSEIDVAKETAEKLGVDNISYVISPQEYMEELPKIMWHMDDPLADPAAVPLYFVAREARKHVTVVLSGEGADELFGGYNIYREPESLRLFARMPNIVKAVLRVIAKMLPDGMKGKSFLERGTTPLEERYVGNAKIYSEKEKAALLKTYQEGREYTAVTAPFYRETLHYPPVNRMQYIDLHTWLRGDILVKADKMTMAHSLELRVPFLDKKVFEVARQIAPDMKTANGTTKYILRKAAEGIVPDHVLNRKKLGFPVPIRHWLKNEMYDWARQLINESETDHLFHKDVLYRLLDEHARHKADHSRKLWTVLAFMVWHQVYVEKKYDFAQSVQNEKRPASVLEA

SEQ ID NO: 28878 - protein, 108 aa, Pseudomonas aeruginosa PAO1
MSEHIVNVTDASFEQDVLKADGPVLVDYWAEWCGPCKMIAPVLDEVARDYQGKLKVCKLNIDENQDTPPKYGVRGIPTLMLFKDGNVEATKVGALSKSQLAAFLDANI

SEQ ID NO: 28879 - protein, 409 aa, Xanthomonas campestris pv. campestris str. ATCC 33913
MAHFELIEKMAPNAVIKVVGVGGGGGNAVAHMVNTNVDGVEFITANTDSQAIKNCGAKLQLQLGTNVTKGLGAGANPEVGRQAALEDRERIMDALQGADMVFITAGMGGGTGTGAAPVVAQLAKEMGILTVAVVTKPFPFEGRRRMQVALKGIEELSQHCDSLITIPNEKLITVLGRNATMIQAFRAANDVLQGAVQGIADLIVRPGLINVDFADVRTVMSEMGLAMMGTGSARGDDRAQAAAEAAIQNPLLDDVNLAGANGILVNITAGPDFTMAEFDEIGRTIEAFASEDATVVVGTVLDPDMQDEVRVTVVATGLNRAVARQTQRPDQRAPIKLVRNATTGQPEFGDFETGGDAVSKAVGGSMGLGLRRPSSDSAGSSNAGASTPAAADLPNDYLDIPAFLRRQAD

SEQ ID NO: 28880 - protein, 453 aa, Arabidopsis thaliana
MTSCIIMHNMIIEDERDIDAPIEERVEVPIEEVEMTVLWLEMPLEEILSRLPLKSTRAVRSTCKKWDSLFKNRSFISKAAAAREGESQMVVLMDHNLHLVSFFFGSDTSVEIKGKRICLNDDSDSEQVKISQVFHCEGLLLCILKDDNFSLVVWNPYWGQTRWIKPRCSFEIPQGCDMYRYAIGYDNKRRNHKILRFIDYEFHYPRDNVVLWYEIYDFESDLWTTLDVTTPHWLINCGNRGVTLKGNTYWCAKKRNSDLFLNADHIICFDFTSERFGPLLLLPFSDLDGVVTLACVREEKLAALVCHEDVVEVWITIKIEANEVLWSKFLTVNVDLGDEIPSSLTYGSFFIDEEKKVAMIFDKTLDRGDTVHIMGEAGYGGQVDLGEPVNKRRCPLVCSYVPSLVQIKKPAGFQRKQQSKLEKRQYVRNISKLRALKTQSSWTLSMSLECHQQ

SEQ ID NO: 28881 - protein, 453 aa, Trichophyton rubrum
MSNLPSEPEFEQAYKELAYTLENSSLFQKHPEYRTALTVASIPERVIQFRVVWEDDNGNVQVNRGYRVQFNSALGPYKGGLRLHPSVNLSILKFLGFEQIFKNALTGLNMGGGKGGADFDPKGKSDNEIRRFCQAFMAELHKHIGADTDVPAGDIGVGGREIGYIFGAYRKAANRFEGVLTGKGLSWGGSLIRPEATGYGLVYYVGHMLEYSGAGSYAGKRVALSGSGNVAQYAALKLIELGATVVSLSDSKGALVATGESGITVEDINAVMAIKEARQSLTSFQHAGHLKWIEGARPWVHVGKVDVVLPCATQNEVSGEEAKVLVANGARFVAEGSNMGCTLDAIELFEAHRNEHKRDQGAVWYAPGKAANAGGVAVSGLEMAQNSQRLTWSAEEVDGKLQAIMKECFETGLRTANEYTEVEDDKLPSLVAGSNIAGFIKVSEAMRDHGDWF

SEQ ID NO: 28882 - protein, 165 aa, Crocosphaera watsonii WH 8501
MFFIQSPIATLGCLILWFGWFGFNAGSTLELNSPAVAHILVNTLVAGATGGIIGTLSAWFMFDNKPSLTFIINGILAGCVSITASCAYVHLLSAVFIGMVGGWFVVWATDFIDRFGIDDPVGAIPVHLFCGFWGTLAVGFFSAGPGVVDWVISEKAFPIGGNRLD

SEQ ID NO: 28883 - protein, 361 aa, Yarrowia lipolytica
MRLAIQAVFLLATLMWLVAAQADFYAVLGLKKGASDKDIKKAYRTLSKKYHPDKNPRNEEAHQTFIEIGEAYEVLSDEEKRGKYDKFGHEGLKNGGGGGTNPFDLFAQFFGGGGGGQRRGVPKGPNTETHIDVSMKRMFKGFDMDLQVNLQGICSSCKGSGSADGVNHKCDGCDGSGVVIQVAQMGMMIQKFQQQCPKCQGKGHLISNPCNKCGGQKVQREDRKYNVYIEPGTPRVHSYSFEEEADKSPDHVAGDLIVQVREAPTENMGYRRRRNDLFRTEALSLKEALHGGWTRKIPFLDEESEVVLSRKKGEPTQHGHIEVIKNHGMPQMGVDDSHGDLYIKYVIVMPMGASSKVRDEL

SEQ ID NO: 28884 - protein, 294 aa, Sulfolobus tokodaii str. 7
MRIRIAARGSKLSRIQVMMVENYLHKLGIETEFIEIKTKADLFQNEPLSKLGKGVFEKEVNQAVLDNKADVAVHSMKDILTEISENLEIYAVLPRDPPFDILISRKNLFNLEPNSIIGTSSIRRKNFLTFYRNDLNIKDLRGNIDTRLKKYFEGQYDGIIIAEASIYRLKEQVQYYRLDPHLFTPEANQGIIVVIGRKKDETIKKIFNEINDKDTLEIAIAERKALSIVGGGCHSPIGVYFEKYDKDFHGIISSSFGRKKITIEEYFHNMTPYEAGELLGKRFLEEIKNEGIIP

SEQ ID NO: 28885 - protein, 477 aa, Aspergillus oryzae
MADNVPAQTPSTLPPPPQTSAAPGQQYDGAQGNGQANPSHMPPPPRPPVVIPQNTNPIPTAITSPMSGNMMSPTSAGGYVRRAAPEPNKRALYVGGLDQRVTEDILKQIFETTGHVVSVKIIPDKNKFNSKGYNYGFVEFDDPGAAERAMQTLNGRRIHQSEIRVNWAYQSNSTNKEDTSNHFHIFVGDLSNEVNDEILQQAFSAFGSVSEARVMWDMKTGRSRGYGFVAFRDRADADKALGSMDGEWLGSRAIRCNWANQKGQPSISQQQAMAAMGMTPTTAFGHHHFPTHGIQSYDMVVQQTPQWQTTCYVGNLTPYTTQNDLVPLFQNFGYVLETRLQADRGFAFIKMDSHENAAMAICQLNGYNVNGRPLKCSWGKDRPPTGQFDNFSGQQGNSPFNNSPAPYFPQYGGPGGPMTPQGPNPAGRGWDQSGMGGQNYGQVPGNAGYGRGQAAPASGWNQANNANFGNGFGGYQA

SEQ ID NO: 28886 - protein, 78 aa, Arabidopsis thaliana
MGSSMLSSATMVASPAQATMVAPFNGLKSSGAFGASLKANNDITSITSNGGRVNCMQGIYISSFTFLIIHMIFFGSFF

SEQ ID NO: 28887 - protein, 475 aa, Saccharomyces cerevisiae
ARTDNFKLSSLANGLKVATSNTPGHFSALGLYIDAGSRFEGRNLKGCTHILDRLAFKSTEHVEGRAMAETLELLGGNYQCTSSRENLMYQASVFNQDVGKMLQLMSETVRFPKITEQELQEQKLSAEYEIDEVWMKPELVLPELLHTAAYSGETLGSPLICPRGLIPSISKYYLLDYRNKFYTPENTVAAFVGVPHEKALELTGKYLGDWQSTHPPITKKVAQYTGGESCIPPAPVFGNLPELFHIQIGFEGLPIDHPDIYALATLQTLLGGGGSFSAGGPGKGMYSRLYTHVLNQYYFVENCVAFNHSYSDSGIFGISLSCIPQAAPQAVEVIAQQMYNTFANKDLRLTEDEVSRAKNQLKSSLLMNLESKLVELEDMGRQVLMHGRKIPVNEMISKIEDLKPDDISRVAEMIFTGNVNNAGNGKGRATVVMQGDRGSFGDVENVLKAYGLGNSSSSKNDSPKKKGWFHHHHHH

SEQ ID NO: 28888 - protein, 362 aa, Prochlorococcus marinus subsp. marinus str. CCMP1375
MSSPRKRRVFPFAAVIGQSEMKLALLLNVIDPRIGGVMIMGDRGTGKSTTIRALADLLPAIKVVEGDPYNSSPDDPDLQSSDVREQIDQGTTPSTENKQVPMVDLPLGATEDRLCGTIDIEKALSEGVRAFEPGLLAKANRGLLYVDEVNLLDDHLVDVLLDSAASGWNTVEREGISIRHPARFVLIGSGNPEEGELRPQLLDRFGMSVEVRTVREPELRVKVVDQRTSFDNDPENFVSSIQSSQDELQAKVVAAQELLQSVNIDDDLRLKISAICGELDVDGLRGDIVTNRSARALAAFEARSEVTEEDIARVISCSLRHRLRKDPLEQIDSGDRVIKAFCKIFERSDQANLADFELAAIE

SEQ ID NO: 28889 - protein, 137 aa, Hypocrea lixii
MVAAKKHVPIVKKHKTTFARHQSDRFDRCRFQLEKAQGIDGRVRRRFRGTIRMPKIGYGSNKKTRFLTPSGHNAFLHNARTLSCAAGCSMQSTDPSAAEIATPVSSRKRIASSPARQADRCSRSRRSKFRPRRLRAS

SEQ ID NO: 28890 - protein, 336 aa, Bacteroides thetaiotaomicron VPI-5482
MRIGILTSGGDCPGINATIRGVCKTAINHYGMEVIGIHSGFQGLLTKDIESFTDKSLSGLLNQGGTMLGTSREKPFKKGGVVSDVDKPALILQNIQEMGLDCVVCIGGNGTQKTAAKFAAMGVNIVSVPKTIDNDIWGTDISFGFDSAVSIATDAIDRLHSTASSHKRVMVIEVMGHKAGWIALYSGMAGGGDVILVPEIPYNIKNIGNTILERLKKGKPYSIVVVAEGILTDGRKRAAEYIAQEIEYETGIETRETVLGYIQRGGSPTPFDRNLSTRMGGHATELIANGQFGRMIALKGDDISSIPLEEVAGKLKLVTEDHDLVIQGRRMGICFG

SEQ ID NO: 28891 - protein, 316 aa, Deinococcus radiodurans
MTTLTNQKPLGVLFMAYGGPENLGEMPGYLADIRAGRVTSQAILDEITNNYRLIGGKSPLPEFTRAQVEATMEQLASTGRPLKAYIGMRHWSPWIEDAVREMLDDGIEQAIAIVLAPQYSSLSVAKYQKKIKAALEMNHGHIDFAYIDNYHTEPGYITALADRVRIGIQEFPEDERDDVHVILSAHSLPVRIIKEGDPYADQLHETARLVAAQAGLTDEQWSWSYQSAGRSPEPWLGPQLDEHLRDLNEQGIKKVVSIAIGFVSDHVEILFDIDIAAQEVAHELGMTLVRPPALNTDPLFIGTLASVIERKAAEVA

SEQ ID NO: 28892 - protein, 605 aa, Corynebacterium diphtheriae
MTSPDTFISAPAAIVTPRGDKAPGQAPWNTQRNSSMAVNRYQPFHVEVENIDLPDRTWPQKRITKAPQWCAVDLRDGNQALIDPMSPERKRRMFNLLVNMGYKEIEVGFPSASQTDFDFVREIIENNMIPNDVTIQVLVQAREHLIRRTFEACEGAKNVIVHFYNSTSILQRDVVFRKDKAAIKKLATDAAELIKSIAVDYPDTNWRWEYSPESYTGTELTYAKEVVDAVVAVMDPTPENPIIINLPSTVEMITPNVYADGIEWMHRNLNRRDSIILSLHPHNDRGTGVAAAELGYLAGADRIEGCLFGNGERTGNVCLVTLGLNMFTQGVDPQIDFSDIDQIRRTVEYCNQLRVPERHPYGGDLVFTAFSGSHQDAVNKGLDAMASRVHPGATHTEVSWDELRGETWEVPYLPIDPKDVGRNYEAVIRVNSQSGKGGVAYIMKTDHGLALPRPMQVEFSSIVQEVTDAEGGEVNSKNMWDIFAREYLDSTSPVEQVSMSVNAAETENDEARIHARLIVNGSETTIEGHGNGPIAAYANALESLGIDVEVQEYEQHARTAGDDAEAAAYILAEVNGKKFWGVGIAGSITYASLKAITSAVNRALS

SEQ ID NO: 28893 - protein, 280 aa, Ralstonia metallidurans CH34
MSDVTLQNFEADVIEMSRQVPVLVDFWAPWCGPCRTLGPMLEKLEAESGGKWRLAKVNVDENQELAAHFGVRSIPHVVAFADGQAVDQFIGVLPESQLREFLDRLTPNPGELALREAVELAAAGDREAAQASFQAALAYDPGADTARLTYIGFLLDGNKIADAETEFGLLSPRAAQEDAYAALQTRLEAMKGVGDLPDGADLKARVAANPADLPARLDLAHVLIARREYEAALEQLLEIVRSDRWFEDDVGRKTMLSVFELMGDDPAVSRWRRQLATVLN

SEQ ID NO: 28894 - protein, 554 aa, Escherichia coli K12
MCSIFGVFDIKTDAVELRKKALELSRLMRHRGPDWSGIYASDNAILAHERLSIVDVNAGAQPLYNQQKTHVLAVNGEIYNHQALRAEYGDRYQFQTGSDCEVILALYQEKGPEFLDDLQGMFAFALYDSEKDAYLIGRDHLGIIPLYMGYDEHGQLYVASEMKALVPVCRTIKEFPAGSYLWSQDGEIRSYYHRDWFDYDAVKDNVTDKNELRQALEDSVKSHLMSDVPYGVLLSGGLDSSIISAITKKYAARRVEDQERSEAWWPQLHSFAVGLPGSPDLKAAQEVANHLGTVHHEIHFTVQEGLDAIRDVIYHIETYDVTTIRASTPMYLMSRKIKAMGIKMVLSGEGSDEVFGGYLYFHKAPNAKELHEETVRKLLALHMYDCARANKAMSAWGVEARVPFLDKKFLDVAMRINPQDKMCGNGKMEKHILRECFEAYLPASVAWRQKEQFSDGVGYSWIDTLKEVAAQQVSDQQLETARFRFPYNTPTSKEAYLYREIFEELFPLPSAAECVPGGPSVACSSAKAIEWDEAFKKMDDPSGRAVGVHQSAYK

SEQ ID NO: 28895 - protein, 224 aa, Phaseolus acutifolius
SRQIQQMVRFIRQEAEEKANEISVSAEEEFNIEKLQLVEAEKKKIRQEYERKERQVEIRKKIEYSMQLNASRIKVLQAQDDVISSMKEAASKELLTSNHHDHVYKNLLKDLIVQCLLRLKEPSVLLRCRKEDLHFVEHVLDSAAQEYADKANIDPPEIIVDNQVYLPPGPSHHNAHDISCSGGVVLASRDGKIVCENTLDARLDVVFRKKLPEIRKQLFGQVVA

SEQ ID NO: 28896 - protein, 106 aa, Populus alba
LVKAKRYLEDVMAHKQAIPFRRFCGGVGRTAQAKNRHSNGQGRWPAKSAKFILDLLKNAESNAEVKGLDVDALYISHIQVNQAQKQRRRTYRRMEELILTCPALPH

SEQ ID NO: 28897 - protein, 221 aa, Idiomarina baltica OS145
MQPLIAPSILSADFARLGEEVNNVLAAGADVIHFDVMDNHYVPNLTIGPMVCKALRDYGVTAPIDVHLMVKPVDRIVPDFAAAGASIISFHPEASEHVDRTIQTIKEHGCQAGLVFNPATPLHYLDYVMDKIDLILLMSVNPGFGGQKFIPGTLDKLRQVRERIDASGRDIRLEVDGGVNCDNIGEIAQAGADMFVAGSAIFNADDYAEVIRTMKQAINAN

SEQ ID NO: 28898 - protein, 598 aa, Guillardia theta
MLLLSSENVSDRIAVIREDKCNPNKCNKECKKNCPVEKAGKLCIKIEDSNNIVNIHEINCIGCGICVKKCPYDAIKIINLPFMKKKPIHSFGLNSFRLYSLPIPKKNLIIGLIGANGIGKSTSFKIIAGELYPNFGEIGKKNSYKETVKLFKGSELFYFFQEFEKKKITVSIKTQNVEKLRETFNGKVKENIKNYYDLFNLLDLSIYDDILEKDIEFLSGGELQKFAMLKTFIENSDILLIDEFTSFLDIKQRIEMTNFIKMFHKLNQNKYCITIDHDLTIIEFLSDMISITYGESGGYGNISLQYKPKDALNMYFDGYLPSENIRFRPFSFEFSIRNKSVNSISSKKIQIEYENMNIKLGKLKLNIKSGTLNKSESIIFLGENGKGKTSLLKIFAGILKTEKYEIFKKNQISYKPQMISPRFIGTVEELFIKKIPFVFTDEYLKDLLIKPLKINSLLKKDLSYLSGGELQRIAITLCLAQDADLYLIDEPSAYLDIDQRIVISKIIRKMCSNSNKTFLIIEHDFLMASSIGDKVINFKPENSTLIEVSSPIEINRGINEFLEIMEITYRSDSMTNRPRINSKNSLIDREQKKQKKFF

SEQ ID NO: 28899 - protein, 150 aa, Rickettsia conorii str. Malish 7
MRQSGNPYYSHPIEIKIMLAEFVAEEAPKLYNIIMLQVQAALLHDTIEDTELTAEAITEIFGPEVAKHVEGLTRIKSYGKISRGESLNLLIKEKRYNTALIKLFDRIHNVQTLGVKSPEKARKIIEATLINFLLVAANINYKLEQELSYA

SEQ ID NO: 28900 - protein, 933 aa, Staphylococcus aureus
MNMKKKEKHAIRKKSIGVASVLVGTLIGFGLLSSKEADASENSVTQSDSASNESKSNDSSSVSAAPKTDDTNVSDTKTSSNTNNGETSVAQNPAQQETTQSSSTNATTEETPVTGEATTTTTNQANTPATTQSSNTNAEELVNQTSNETTFNDTNTVSSVNSPQNSTNAENVSTTQDTSTEATPSNNESAPQSTDASNKDVVNQAVNTSAPRMRAFSLAAVAADAPAAGTDITNQLTNVTVGIDSGTTVYPHQAGYVKLNYGFSVPNSAVKGDTFKITVPKELNLNGVTSTAKVPPIMAGDQVLANGVIDSDGNVIYTFTDYVNTKDDVKATLTMPAYIDPENVKKTGNVTLATGIGSTTANKTVLVDYEKYGKFYNLSIKGTIDQIDKTNNTYRQTIYVNPSGDNVIAPVLTGNLKPNTDSNALIDQQNTSIKVYKVDNAADLSESYFVNPENFEDVTNSVNITFPNPNQYKVEFNTPDDQITTPYIVVVNGHIDPNSKGDLALRSTLYGYNSNIIWRSMSWDNEVAFNNGSGSGDGIDKPVVPEQPDEPGEIEPIPEDSDSDPGSDSGSDSNSDSGSDSGSDSTSDSGSDSASDSDSASDSDSASDSDSASDSDSASDSDSDNDSDSDSDSDSDSDSDSDSDSDSDSDSDSDSDSDSDSDSDSDSDSDSDSDSDSDSDSDSDSDSDSDSDSDSDSDSDSDSDSDSDSDSDSDSDSDSDSDSDSDSDSDSDSDSDSDSDSDSDSDSDSDSDSDSDSDSDSDSDSDSASDSDSDSDSDSDSDSDSDSDSDSDSDSDSDSDSDSDSDSESDSDSESDSDSDSDSDSDSDSDSDSDSDSASDSDSGSDSDSSSDSDSESDSNSDSESGSNNNVVPPNSPKNGTNASNKNEAKDSKEPLPDTGSEDEANTSLIWGLLASIGSLLLFRRKKENKDKK

SEQ ID NO: 28901 - protein, 313 aa, Escherichia coli O157:H7
MLDNVLRIATRQSPLALWQAHYVKDKLMASHPGLVVELVPMVTRGDVILDTPLAKVGGKGLFVKELEVALLENRADIAVHSMKDVPVEFPQGLGLVTICEREDPRDAFVSNNYDSLDALPAGSIVGTSSLRRQCQLAERRPDLIIRSLRGNVGTRLSKLDNGEYDAIILAVAGLKRLGLESRIRAALPPEISLPAVGQGAVGIECRLDDTRTRELLAALNHHETALRVTAERAMNTRLEGGCQVPIGSYAELIDGEIWLRALVGAPDGSQIIRGERRGAPQDAEQMGISLAEELLNNGAREILAEVYNGDAPA

SEQ ID NO: 28902 - protein, 270 aa, Xanthobacter autotrophicus Py2
MSAPTSAAVDEHPIRLDIAEGIARIRFNRPHVLNAINDAAVLALKAAVDQVAKDESVRVVVLSGEGRAFMAGGDVGRFHEAGRDAPKVVSAIIDPFHHAIVSLAAMPAPVIACLHGAVAGAGVSVALAADLAIAADDIKMTLAYTRIGTSPDGSSTFSLPRVVGLRKAMEIALLSDTVEAAEALRLGLVNKVVPAADLQAETDALAKRLAAGPTLAYGRIKHLLRASFNHSLSDQLNAERDAFIASAGTHDFAEGATAFVEKRAPRFEGR

SEQ ID NO: 28903 - protein, 112 aa, Shewanella sp. MR-4
MKLITAIIKPFKIDDVREALTQLGIQGMTVTEVRGFGRQKGHTELYRGAEYAVDFLPKMKLEIAIHSELEDAVIEAIVAAAHTGKVGDGKIFVTPLEQVIRVRTAEEGSDAI

SEQ ID NO: 28904 - protein, 504 aa, Synechococcus sp. RS9917
MAVADQPLQLVWFKRDLRSVDHRPLALALERGPVLPLYIVEPQFWLQPDASARQWAFCREALEALQERLSALGQPLVVRVGDAVEVLERARLRLGVAALWSHEETGNAFTYARDRRVKAWARSHGIPWRECPQFGVIRGLRRREGWATRWQERMATPLTPEPLALPPLPAIQPGGLPSASDLGLTADPCPCRQRGGRPQAETVLQDFLQRRVQRYCGSISSPLTAFDGCSRLSPYLTWGCLSLREVVQASASLTCRGVRNFRSRLHWHCHFIQKLESEPAIEHRDFHPFMRDIRVWDAERYQAWAEGRTGLPFVDACMRALIAHGWINFRMRAMLMSVATYHLWLPWRDTGLHLARLFVDYEPGIHWSQCQMQSGSTSINTIRIYNPIKQGLDHDPKGVFIRRWCPELAHRPDVWLHEPWRGGGDHPAPIVDPDQAAREARDRIWAIRRAAGFDRIADAIQERHGSRRAGLTPTGGRGSRRRRRTDIADASMRQLSLQVEIDPA

SEQ ID NO: 28905 - protein, 106 aa, Candidatus Protochlamydia amoebophila UWE25
MSDKLVHLNDDNFQQTISQGVTLVDFYATWCGPCRMIAPIVEQLSTTLQGKAKVAKLDIDQAQSTTADLQITSVPTLIVFKDGKEVKRVVGVKDLDYLLNLVQSFT

SEQ ID NO: 28906 - protein, 122 aa, Medicago truncatula
MSSSRGGAEVRASHILIKHEGSRRKASWKDPEGYVIKNTTRESAVAILTSMKEDILTGKAKFEDLASRYSDCSSAKRGGDLGSFGRGQMQKPFEDATYALQVGEISDIVDSDSGSHIIKRTN

SEQ ID NO: 28907 - protein, 263 aa, Shewanella sp. MR-4
MSELNSGIYYGSVTHSRYTPVKHHFSYQMALLAIDLDEVDSISAMGRSFASQRRALLRFNPKDYLRTFTTRDNQSRQLEINEPSSFALKQRVLEQVAELGGHQPCDRVLFVGQIRHFGVYFSPVNFYFCYQAQQPLYMLAEVSNTPWDQRHCYLVDLSTPKTTDKVFHVSPFMNLDMRYQWHVEPPAERLNIGIENLPNQSGKRLFNASLSMTRQAINAQSLRALLFRFPFMTLKIFGGIYWQALKLFFKRVPFVPHPAQVEK

SEQ ID NO: 28908 - protein, 519 aa, Candida apicola
MNINFSDALMLGGISLSFLLASQAIYFYFIYSPRAKKLGCAPPPIFFSFPLGIPDLIRLVNAWFHDDLLEWFTHRFEEFGRRTAFQSVAGQLWIGTIEPENIKTMLATSFKDYSLGFRYNAMYGLLGNGIFTLSGDGWKNSRALLRPQFSREQVSHLESMRTHINMMINNHFKGGQVVDAQVLYHNLTIDTATEFLFGESTNTLDPALAQQGLPGPKGLVTGEQFAEAFTSALELLSVRVMAGAAWFLVWTPKFWRSCKVCHNFIDYFVYKALATPMEKGQDADRYVFIRELTKETSDPRVIRDQALNILLAGRDTTAALLSFTTYYLGAYPEVYDELREAVIADFGSADAEPPTFEQLKQCKVLQNVIREVLRLHPNVPLNFREAIADTTFPTGGGPNGDQPIFVPKGQKVFYATYVMQRNAGIWGPDSTSFRPDRWNEPREALASGWDYIPFNGGPRICLGQQFALTEASYTLVRICQEFSRIEVLHPDVITARNVMKQRMRLPNSSSGGVITRFIR

SEQ ID NO: 28909 - protein, 493 aa, Shewanella sp. MR-4
MSDNQPQAAKHTLMWFRQDLRLTDNQALTAACDWVRQVPGAKLRAIYIATPSQWLSHDMAPIQIDFIQRHVNLLAQGLASLGIEFELIQLDSFKEVPAFLASYCEKLGVERVFAGREPEINEQKRDQACLDVGIPLVLSDEHCLLPPGTVLNLSGDMYKVFTPFSRKWREVAAKRAILPLAVPAPLGPMLPEPKPISFKERFPFTSKLTSSEQWAAGEGQAKRILTAFIQQKAQDYKQDRDFPALEGTSVISPYLALGVLSPRQCIAALLGRFPEVIVDDTSPGRTWLNELIWREFYRHLLVAFPDLSKGHNFNRQADHVQWRNNQAEFLAWCEGKTGYPIVDAAMRQLNQTGWMHNRLRMVVASFLTKHLLIDWRWGERYFRQHLIDGDLAANNGGWQWSAGCGCDAQPYFRIFNPISQSEKFDPDGSFIRKYLPELASWGIKRLHQPNMQKTPSLFEVPTLESDSAYPYAIVEHNAARARALAVLGVLKKA

SEQ ID NO: 28910 - protein, 597 aa, Francisella tularensis subsp. tularensis SCHU S4
MSEKLQILRSLMQEKDYDFYIVPSVDDHNNEYVPKCWQYRAWISGFDGSAGDVLVGMDKAYLSTDGRYFLQAEQQLDKNDFELIKQSSFAPEIVKWLWKNAKGKTIAVDPAKLSYKSTLELLDYLNSNDYNVVFDQDNLVHKAQQMLSQVVDVPCTTIQEHAIQYSGRSVASKIEELRRTMKQTRSDFYVDSKLDHIAWLLNIRARDVECTPLVISYLFVSLDKIILYVNDRKITPAIKKYFDDNHIQTRDYYQFYQDLEATTGKYLLDGANINYKVPLSINKNQNSSCYFLMIDSPVGLSKALKNPVEINGSKEAHRKDAAAFISWWHWIENNYQGVDEIEAAAKLREFRAQQQGYVEDSFSYIVGHAANGAIIHYMAKKDANLKKIDDQAPLLCDSGGQYREGTTDITRVLHFGKPSKEHRKYYTLVLKGHLGLGRAVFPKGTTGSQLDVLAREHLWHFCADYAHGTGHGVGSFLGVHEGPQRINSVSKVELMPGMILSNEPGAYFPGEFGIRIENLCYIKQRNQESPTGHGPFYCFEDLTLVPYEYKLIETWMLTYTEKKTINNYYSRIRKEVLPLINDPQVREFLLFKTRHIK

SEQ ID NO: 28911 - protein, 718 aa, Synechococcus sp. PCC 7002
MRPQSPRYIVLISIHGLIRSQNLELGRDADTGGQTKYVVELAAALAQHPDIEQVDLITKQIIDPKVSADYGQSCEPISEKANIIRISAGIDDYIPKEELWDYLDNFADNTLTYLNHQPRLPDLIHSHYADAGYVGIRLANHLGIPLFHTGHSLGRSKRKRLLASGVKGELIESRYRLTRRINAEEETLASATRVITSTQQEIQGQYAQYDFYHPENMRVIPPGTDLQCFYPPTGDEWQGSVWQKLAVFLQEPRKPMILALSRLDQRKNILGLIRAFGTSPSLQQQANLVVFSGTRDDPRDLSSNAQAIFTELLWAIDRYNLYGKVAYPKFLSAQEIGELYRLASLSQGVFVNPALTEPFGLTLIEAAASGLPIVATEDGGPVDILKNCQNGYLVNPLEPQNIAAKISKILGDAQRWQTFSQQGIRNVRRVYTWQSHVERYMEVVQSILNRTESRQELAIARRPALYHQGAIVSTIDQNLVGDPLALQALVDLLNQHRKEIAFCIATGRRLDAALKVLREHNIPQPDVLMTSLGTEIYYAPQLTPDWAWSNHINYLWNRQRVVDLLGDLPGLELQPKLFQSTFKISYFYDPAIAPSVEELKRILFKNDQTVNVMFSFGQYLDVVPIRASKGYGLRWFAEQWEIPLNRILTVGGSGADEDMMLGNSLSVVVKNRHREELSDLNNIQPIYFSEKEFAAGILDGLAHYNFLELCRATGQNHD

SEQ ID NO: 28912 - protein, 226 aa, Wolbachia endosymbiont strain TRS of Brugia malayi
MGIKIAPSILSANFAKLGEEVKRINNLGVDYIHIDVMDGNFVPNITIGPGVISTIRKYTNLFFDVHLMIKSPGDHVESFINAGADIITIHAEAEVHLERLIRKIKSYKNVNDAKKKVQVGVSIVPSTSPGIFEYIIHELDIVLIMTVNPGFGGQEFIYSQLGKISVVKKMIRERGLKTQISVDGGVSLSNAADIIKAGADILVAGSAIFRAKNMKKAVNDFKNLSL

SEQ ID NO: 28913 - protein, 526 aa, Prochlorococcus marinus subsp. pastoris str. CCMP1986
MNNDFNSWDKYCNYLWFDKQVNIWLDISKINFTLDQISSLENKFKKVFSALKELEAGAISNIDEKRQVGHYWLRNPSVAPSNLIKDAINNEIRDISEFGEKILEGKITNNKNQKFTNVLWIGIGGSGLGPLLITEALQENSCGLNFSYIDNIDPFLISEKLDELSDKLATTLFVVVSKSGGTPEPKIAMNIIKKHVENKNLDWNSNAIAITMKDSQLYKKAQLENWLKIFNLPDWVGGRTSITSSVGLLPLALINRDVSEFIKGAAIMDDLTRIPNIKDNPAALLSSAWFFSGDGIGKRDMVVLPYRDRLQVFSKYLQQLVMESLGKKFNRKGEIVHQGISVFGNKGSTDQHAYVQQLRDGIDNFFCVFIELLDTPNSNFYFDSENPKEFLSGFLQGTRSALSNENRQSITITLDKLSCLTLGALIALFERAVSFYAELVDINAYDQPGVEAGKKAAAEIIDYQKQVTEIFNNGEELSIKEITSLLRNSSAEPIFFIIRQMCFGNDDYLINGDWSKPSTIRIKKIS

SEQ ID NO: 28914 - protein, 143 aa, Oryza sativa
MKERGVRNKQGVIMKALLDRCLSKHRNGGWPEPPEGSFAVYVGGGGGGGGAARERFVVRTECVNHPLFRALLEEAEEEYGYVADGPLELPCDAGEFVAVLARIEREMAEERTVGCAGGLVFRLHPAAHLMLVAPATPPPMIVG

SEQ ID NO: 28915 - protein, 316 aa, Pseudomonas aeruginosa UCBPP-PA14
MSEVKHSRLIILGSGPAGYTAAVYAARANLKPVVITGIQPGGQLTTTTEVDNWPGDVEGLTGPALMTRMQQHAERFDTEIVYDHIHTAELQQRPFTLKGDSGTYTCDALIIATGASAQYLGMSSEEAFMGKGVSACATCDGFFYRNQVVCVVGGGNTAVEEALYLANIAKEVHLIHRRDKLRSEKILQDKLFDKAENGNVRLHWNTTLDEVLGDASGVTGVRLKSTIDGSTSELSLAGVFIAIGHKPNTDLFQGQLEMRDGYLRIHGGSEGNATQTSIEGVFAAGDVADHVYRQAITSAGAGCMAALDAEKYLDDH

SEQ ID NO: 28916 - protein, 572 aa, Salmonella enterica subsp. enterica serovar Typhi str. CT18
MKQTVAAFIAKTLEQAGVKQIWGVTGDSLNGLSDSLNRMGTIEWMPTRHEEVAAFAAGAQAQLTGELAVCAGSCGPGNLHLINGLFDCHRNHVPVLAIAAHIPSSEIGSGYFQETHPQELFRECSHYCELVSSPEQIPQVLAIAMRKAVLNRGVSVVVLPGDVALKPAPENAVTHWYHAPHPVVTPAEEELKKLAQLLRYSSNIALMCGSGCAGAHEELVALAAKLKAPIVHALRGKEHVEYDNPYDVGMTGLIGFSSGFHTMMNADTLILLGTQFPYRAFYPSDAKIIQIDINPGSIGAHSKVDMALVGDIKATLRALLPLVEEKSNRKFLDKALEHYRDARKGLDDLAKLSDKAIHPQYLAQQISHFAADDAIFTCDVGTPTVWAARYLKMNGKRRLLGSFNHGSMANAMPQALGAQATAPGRQVIAMCGDGGFSMLMGDFLSVVQMKLPIKIVVFNNSVLGFVAMEMKAGGYLTDGTELHDTNFARIAEACGITGIRVEKAADVDGALQRAFSIDGPVLVDVVVAKEELAIPPQIKLEQAKGFSLYMLRAIISGRGDEVIELAKTNWLR

SEQ ID NO: 28917 - protein, 251 aa, Brassica napus
MNIAHTIFGVFGNATALFLFLAPSITFKRIIKNKSTEQFSGIPYPMTLLNCLLSAWYGLPFVSKDNTLVSTINGTGAVIETVYVLIFLFYAPKKEKAKIFGVFTAVRAVFATVALVSLFALHGNGRKLFCGIAATVFSIIMYASPLSIMRLVVKTKSVEYMPFFLSLFVFLCGTSWFIYGLIGRDPFVAIPNGFGCALGTVQLILYFIYCGNKGDKSTDDAEKDEKKTVEMKDEEKKKQNVVNGKQQEQQV

SEQ ID NO: 28918 - protein, 421 aa, Corynebacterium diphtheriae
MALVVQKYGGSSLESAERIRRVAERIVATKKQGHDVVVVCSAMGDTTDELLDLAAQVNPVPPAREMDMLLTAGERISNALVAMAIESFGAKAQSFTGSQAGVITTERHGNARIVDVTPGRVREALDEGKICLVAGFQGVNRESKDVTTLGRGGSDTTAVALAAALNADVCEIYSDVDGVYTADPRIVPNAQKLEKLCFEEMLELAASGSKILVLRSVEYARAFGVPLRVRSSYSNDPGTLVAGSMEDIPVEEAVLTGVATDNSEAKITVLGIPDSPGSASAVFRALADAEINIDTVLQNISSLEDNRTDITFTCPRADGPHAMELLRNLQAKNDWQNVLYDDQIGKVSLVGAGMKSHPGVTAEFCEALRDAGVNIELISTSEIRISVLIRESDVDVAARAIHEKFELGGETEAIVYAGTGR

SEQ ID NO: 28919 - protein, 577 aa, Prochlorococcus marinus subsp. pastoris str. CCMP1986
MKETSPKSNNGTIVDNNENFNIEFDPISDALAAIRNGECIIVVDDERRENEGDLICAAQFATPQQINFMATEGRGLICLAMQGEKLDALDLPLMVDRNTDENQTAFTISIDAGPENNVTTGISAEDRAKTIQVAINPSTKPEDLRRPGHIFPLRAKKGGVLKRAGHTEAAVDIAAMSGLYPAGVICEIQNPDGSMSRLPQLKQYAKEWGMKLISIADLISYRFQNERFVYRKSDAILPSIFGNFKAYGYINELDGSEHIALVKQKSNKLSEPVLVRMHSECLTGDAFGSLRCDCRPQLEAALARIEKEEEGVVVYLRQEGRGIGLINKLKAYSLQDGGLDTVEANEKLGFPADLRNYGVGAQILTDLGIKKLKLLTNNPRKIAGLGGYGIEVTERVPLVICPGEHNSEYLNVKRQKLGHMLEEEKLNSIDIDPYIAIFLDGDYKSIDLVPIKNKIIEFCEKNKINIMLESSPRLLAFWNRPKLVWKILHDKNREDFTINDNEINKIEIFIKFLSEYNKSSKVGIIVSKNIQQALHPKNSIKLKNTKFSIKNEELHSSTRKFNLDKETFSIIFDKKLS

SEQ ID NO: 28920 - protein, 107 aa, Actinobacillus actinomycetemcomitans
MSEVLHSSDATFVADVLNSEVPVLLDFWATWCGPCKMIAPILDDLAVEFDGKVKIVKINIDDNQATPAQFGVRSVPTLLLFKDGKPVATQVGALPKNQLAAFINQNI

SEQ ID NO: 28921 - protein, 289 aa, Wolbachia sp. 1032
QSNLQGVNFVVANTDAQALEKSLCDKKIQLGINLTKGLGAGALPDIGKGAAEESIDEIMEHIRDSHMLFITAGMGGGTGTGAAPVIAEAAREARAVVKDKGAKEKKILTVGVVTKPFGFEGVRRMRTAELGLEELQKYVDTLIVIPNQNLFRIANEKTTFADAFQLADNVLHIGIRGVTDLMIMPGLINLDFADIETVMSEMGKAMIGTGEAEGEDRAISAAEAAISNPLLDNVSMKGAQGILINITGGGDMTLFEVDAAANRVREEVDENANIIFGATFDQVMEGRVR

SEQ ID NO: 28922 - protein, 332 aa, Candida glabrata CBS 138
MVRIAINGFGRIGRLVLRVALSRSNIEVVAVNDPFITTDYAAYMFKYDSTHGRYAGEVTHDDKHIIIDGKKIAVHQERDPANLPWGSENIDIAIDSTGVFKELDTAQKHIDAGAKKVVITAPSSTAPMFVVGVNEDKYTSDLKIVSNASCTTNCLAPLAKVIDEAFGIEEGLMTTVHSLTATQKTVDGPSHKDWRGGRTASGNIIPSSTGAAKAVGKVLPQLQGKLTGMAFRVPTVDVSVVDLTVKLQKETTYDEIKKVIKQASEGKLKGVLGYTEDAVVSSDFLGDSRSSIFDASAGIQLSPKFVKLVSWYDNEYGYSTRVVDLVEHVAKN

SEQ ID NO: 28923 - protein, 207 aa, Magnaporthe grisea 70-15
MASLRSSSTAAARLLRSASWQQTRAVVAGRRHESSLVRSEKSGPALPDTDAKPANQPDYQSAFDKATSTFSPVPKRVLDGSEPTEALPAAVLSGAPMELQARTVRIYRPSKPATQSGTHGLRQWRMDWDVLGKGHRWENPLMGWQSSGDFMQGSHIYFKSKEEAIAFAEKQGYEYFVQEPNERKITPKAYANNFLYSDKKLKHIRTK

SEQ ID NO: 28924 - protein, 289 aa, Wolbachia sp. 123B
QSNLQGVNFVVANTDAQALEKSLCDKKIQLGINLTKGLGAGALPDVGKGAAEESIDEIMEHIKDSHMLFITAGMGGGTGTGAAPVIAKAAREARAAVKDRAPKEKKILTVGVVTKPFGFEGVRRMRIAELGLEELQKYVDTLIVIPNQNLFRIANEKTTFSDAFKLADNVLHIGIRGVTDLMVMPGLINLDFADIETVMSEMGKAMIGTGEAEGEDRAISAAEAAISNPLLDNVSMKGAQGILINITGGGDMTLFEVDAAANRVREEVDENANIIFGATFDQAMEGRVR

SEQ ID NO: 28925 - protein, 325 aa, Oryza sativa (japonica cultivar-group)
MARKKIREYDSKRLLKEHLKRLAGIDLQILSAQVTQSTDFTELVNQQPWLSTMKLVVKPDMLFGKRGKSGLVALNLDIAQVKEFVKERLGVEVEMGGCKAPITTFIVEPFVPHDQEYYLSIVSERLGSTISFSECGGIEIEENWDKVKTIFLSTEKPMTPDACAPLIATLPLEARGKIGDFIKGVFAVFQDLDFSFLEMNPFTIVNGEPYPLDMRGELDDTAAFKTSRSGEISNSHYHSVEFSVLQKALSMTWMRSASLKFTVLNPKGRIWTMVAGGGASVIYADTCATADPDGRKRALLIGGGIANFTDVGATFSGIIRALREK

SEQ ID NO: 28926 - protein, 244 aa, Zea mays
  misc_feature (21)..(21): Xaa can be any naturally occurring amino acid
MYKLGRGNRDKVQQFMTITGXQALKASDWHLEGAFDFFYSQPQVSVVNTRHLEDIFNRYKEPDADMIMVEGISQFCNDLQVDPQDIVMLVISWHMKAATMCEFTRQEFIGGLQSIGVDSIEKFRGKLPSLRAELKDDNKFRDIYNFAFTWAREKGQKSLSLETAIGMWQLLFAERNWPLLDHWCQFLQVRHNKAISRDTWSQLLEFVKTTDPQLSNYDDEGAWPYLIDEFVEYLTENGLVQRKR

SEQ ID NO: 28927 - protein, 289 aa, Wolbachia sp. MB35
QSNLQGVNFVVANTDAQALEKSLCDKKIQLGINLTKGLGAGALPDIGKGAAEESIDEIMEHIRDSHMLFITAGMGGGTGTGAAPVIAKAAREARAVVKDKGAKEKKILTVGVVTKPFGFEGVRRMRTAELGLEELQKYVDTLIVIPNQNLFRIANEKTTFADAFQLADNVLHIGIRGVTDLMIMPGLINLDFADIKTVMSEMGKAMIGTGEAEGEDRAISAAEAAISNPLLDNVSMKGAQGILINITGGGDMTLFEVDAAANRVREEVDENANIIFGATFDQVMEGRVR

SEQ ID NO: 28928 - protein, 546 aa, Escherichia coli K12
MAIHNRAGQPAQQSDLINVAQLTAQYYVLKPEAGNAEHAVKFGTSGHRGSAARHSFNEPHILAIAQAIAEERAKNGITGPCYVGKDTHALSEPAFISVLEVLAANGVDVIVQENNGFTPTPAVSNAILVHNKKGGPLADGIVITPSHNPPEDGGIKYNPPNGGPADTNVTKVVEDRANALLADGLKGVKRISLDEAMASGHVKEQDLVQPFVEGLADIVDMAAIQKAGLTLGVDPLGGSGIEYWKRIGEYYNLNLTIVNDQVDQTFRFMHLDKDGAIRMDCSSECAMAGLLALRDKFDLAFANDPDYDRHGIVTPAGLMNPNHYLAVAINYLFQHRPQWGKDVAVGKTLVSSAMIDRVVNDLGRKLVEVPVGFKWFVDGLFDGSFGFGGEESAGASFLRFDGTPWSTDKDGIIMCLLAAEITAVTGKNPQEHYNELAKRFGAPSYNRLQAAATSAQKAALSKLSPEMVSASTLAGDPITARLTAAPGNGASIGGLKVMTDNGWFAARPSGTEDAYKIYCESFLGEEHRKQIEKEAVEIVSEVLKNA

SEQ ID NO: 28929 - protein, 450 aa, Idiomarina baltica OS145
MSYVKETIDMLKRTSPAQNEFYQAVEEVLESIEPLLEEHPKYRQQAIIERLVEPERQIMFRVPWQDDKGQVHVNKGYRIEFNSALGPYKGGLRFHPSVNAGIIKFLGFEQIFKNALTGLPIGGGKGGSNFDPKGKSDAEIMRFCQSFMTELHRHIGPHTDVPAGDIGVGTREIGYLFGQYKRLKNRFEGVLTGKSLRWGGSHARKQATGYGAVYFAQCLLGDRGEKLSDKRCLVSGSGNVAIYAMEKLYELGATPVTCSDSNGMVYHKSGIDLDLVKQIKEENHERLKTYLDTHDDAEYIAREDYPEDGHSVWRYEGDIAFPCATQNELTEQDAQALAENGCLAVLEGANMPSTQAAVDFFVEQKIGYGPGKAANAGGVATSQLEMAQNAGMQQWSFDEVDRKLQEIMKTIYSDCKRTAEQFGSPNNLVLGANIAGFKKVADAMIEQGVV

SEQ ID NO: 28930 - protein, 340 aa, Pseudomonas aeruginosa PAO1
MTENALLLLNLGSPDSTRVEDVRRYLDQFLMDPYVVDLPWPLRRLLVSLILIKRPAESAHAYSSIWWDEGSPLIVLSRRLQEAMKPHWPHGPVELAMRYGQPAIEKVLLDLARRGIRRVTLAPLYPQFADSTTTTAEQEVRRVIAAHRLGLEVSTLPPFYDQPVYLDALVESVRPYLQQPHDHLLLSFHGLPERHIRKLVKDPAHDLLAENSRNVSPEALALCYRSQCLRTAEAFAERAGLEQGRWSVSFQSRLGRAKWIEPYTDAKLDELVQRGVKRLLVMCPAFVADCIETLEEIGMRGREQFISAGGEDLVLIPCLNDHPAWVGALAEMSGRLARPL

SEQ ID NO: 28931 - protein, 209 aa, Guillardia theta
MKFNIANPSTGVQHTIEIDDEDKLRILYGKKLTSKIDGKIIGKEWDKSIFIITGGQDKQGFPMKEGILSPSRVKILLKKGSTGCRGYKMKKGERCRKSVRGCIVSPEISVLNIKLLTNKNDDLLITNKNSEKTLTHKRSSNLRKVLCLTKTDDIRKHYIKIAKDFKNKVKIQRLITPIKIQKKKENIRKKLKRIENYRKSLLDYSLGLI

SEQ ID NO: 28932 - protein, 498 aa, Zea mays
MALAGTGVFAEILDGEVYRYYADGEWRTSASGKSVAIVNPTTRKTQYRVQACTQEEVNKAMDAAKVAQKAWARTPLWKRADVLHKAAAILKEHKAPIAECLVKEIAKPAKDAVSEVVRSGDLVSYTAEEGVRILGEGKLVVSDSFPGNERNKYCLSSKIPLGVVLAIPPFNYPANLAGSKIGPALIAGNALVLKPPTQGAVAALHMVHCFHLAGFPKGLISCVTGKGSEIGDFLTMHPGVNCISFTGGDTGIAISKKAGMVPLQMELGGKDACIVLEDADLDLVSANIVKGGFSYSGQRCTAVKVVLIMESIADAVVQKVNAKLAKLKVGPPEDDSDITPVVTESSANFIEGLVMDAKEKGATFCQEYRREGNLIWPLLLDHVRPDMRIAWEEPFGPVLPVIRINSVEEGIHHCNASNFGLQGCIFTRDINKAILISDAMETGTVQINSAPARGPDHFSFQGLKDSGIGSQGITNSINMMTKVKSTVINLPSPSYTMG

SEQ ID NO: 28933 - protein, 552 aa, Idiomarina loihiensis L2TR
MKASDLFVKALENEGVKYIFGIPGEENLDLLESLSKSSIELILTRHEQGAGFMAATYGRLTGKPGVCLSTLGPGATNLVTPVAYAQLGAMPMVVITGQKPIKERHQGQFQIIDVVDMMTPITKYTQAIISASSIPAHIREAFRRAEDERPGASHLELSDDISREEVSSLPIEASHSRRPITEHKSVRHVLELLREAKHPVLLIGAAANRKITAKMLRAFVDKTGIPFITTQMGKGVINEDHPRWLGNAAVSDGDYPHRAIEKSDLILNVGHDVVEKPPFMMKTGDNDNRKVVHINFQGAQVDSVYFPHASMIGDIGNSIWQLKEGIEPQSHWDFNFMLKVRDHMRDHTDEGAHDGSFPVLPQRLVEDVREAMPDDGVIALDNGIYKIWFARNYPARQPNTVLLDNALASMGAGLPSAMAAKLVNPEKKVMAICGDGGFMMNSQELETAVRMGLDIVVVILNDSGYGMIKWKQQHMKLSDYGLDFNNPDFVKYAESYGANGYRLDKTENLIPLLKDCLNKPGVHLIDVPVNYSQNDRLLNEEIPERSRAIKDI

SEQ ID NO: 28934 - protein, 249 aa, Arabidopsis thaliana
  misc_feature (189)..(189): Xaa can be any naturally occurring amino acid
  misc_feature (221)..(221): Xaa can be any naturally occurring amino acid
HWSKEDEHKLVSMTTSSSSYGTFSTVFNSSRPNSSATFLVPSLKFSTGISNFANLSNGFSLKSPINPGFLFKSRPFTVQARAAAEKTVHDFTVKDIDGKDVALNKFKGKVMLIVNVASRCGLTSSNYSELSHLYEKYKTQGFEILAFPCNQFGFQEPGSNSEIKQFACTRFKAEFPIFDKVDVNGPSTXAPIYEFLKSKRRRILGWVSLKWELLRKFLDWXKRGKVVERYPPTTSPFQIEKDIQKLLAA

SEQ ID NO: 28935 - protein, 341 aa, Photorhabdus luminescens subsp. laumondii TTO1
MEKALAGKKILIVEDEPVFCSLLAGYLRTLGAKVLVASNGAVALQVLGREAHVELILCDLDMPVMNGIEFIAKLTNEGISIPVIIISATNKMAEIDEVLRLGAKDVLLKPVSDLNEIKKSVLAYLHPTVFMSGAIEQNNLNKDWLTLKHNSDEALNMLKQLQPPVSQVIAHCKVNYRKLNMIDNPGLILDMAALSDNELAFYCLDISRSKEYGVISALLLRVIFNSLLQEHIIHHSRRLPNMAAILNRINNLLEGAGLQGQFPLLLGYYHTINKTVLLTSAGLHASIKSGNRQIQLDSGVPLGTLRTICSNQVCSHSAEWQCRIWNTNSQINLMLSSMYSG

SEQ ID NO: 28936 - protein, 391 aa, Synechococcus sp. RS9917
MARVGVLLLNLGGPERIQDVGPFLYNLFADPEIIRLPIPALQKPLAWLISTLRSSKSQEAYRSIGGGSPLRRITEQQARELQSVLRQRGIEATTYVAMRYWHPFTESAVADIKADAMDEVVVLPLYPHFSISTSGSSFRELQRLRQLDPAFQQLPIRCIRSWFDHPGYVRAMAELIAEQVRASERPEEAHVFFSAHGVPKSYVEEAGDPYQREIEACTALIMAELERLLACPNPHTLAYQSRVGPVEWLKPYTEEALEALGAAGTRDLVVVPISFVSEHIETLEEIDIEYRELATEAGVVHFRRVPALDTYPPFIEGLADLVSASLEGPEINLDQAAELPTKVKLYPQEKWEWGWNNSSEVWNGRLAMVGFSAFLLELITGQGPLHALGLL

SEQ ID NO: 28937 - protein, 590 aa, Synechococcus sp. RS9917
MDALRRHGVDTIFGYPGGAILPIYDALHVAEREGWVQHILVRHEQAGTHAADAYARATGKVGVCFGTSGPGATNLVTGIATAQMDSVPMVVITGQVPRAAIGTDAFQETDIFGITLPIVKHSWVVRDPADLGAIVAQAFLIAASGRPGPVLIDIPKDVGQEEFDYVPVEPGSVIPAGFRQPAAPEDGAIAAALDLIEQANRPLLYVGGGAISACAHDSLRVLADRFQIPVTTTLMGKGAFDENDPLSVGMLGMHGTAYANFAVTECDLLIAVGARFDDRVTGKLDTFAPRARVIHFEIDPAEIGKNRQADVAVLGDLGLSLARMVEMSLQRHEEPRTAAWLQRIEAWKQRYPLVVPSPEGAIYPQEVLMAVRACSDDAIVTTDVGQHQMWAAQYLRNGPRGWISSSGLGTMGFGMPAAIGAQMACPERQVICIAGDASILMNIQELGTLAAYGLPVKVVIVNNHWQGMVRQWQESFYDERYSASDMLNGMPDFIALARSFGVDGVKISDRESLRSDLSAALQAPGPMLIDVHVRRGENCYPMVPPGKSNAQMVGLPAHPELAMDTTRSCAACGATTAHEHRFCPSCGASL

SEQ ID NO: 28938 - protein, 554 aa, Triticum aestivum
ARDSDVDCVVNFASSRSVYTSTMELMEYPQIKSIAIIAEGVPERRAREILHVAKKKGITIIGPATVGGIKPGSFKIGNTGGMMDNIVASKLYRKGSVGYVSKSGGMSNELNNIIANTTDGVYEGVAIGGDRYPSTTFIDHLLRYQADPDCKILLLLGEVGGVEEYRVIEAVKRGEITKPIVAWAIGTCASMFTTEVQFGHAGSFANSQLETAAVKNKSMREAGFYVPDTFEDLPKLLSSVYQKMLKDGSIVPQPEPAVPKIPLDYSWAQELGLIRKPAAFISTISDDRGQELLYAGMPISDVFREEIGIGGVMSLLWFRRRLPDYASKFLEMVLMLTADHGPAVSGAMNTIITTRAGKDLISALVSGLLTIGSRFGGALDGAADEFTKAFDKGLSPRDFVDTMRKQNKLIPGIGHKVKSRNNPDLRVELVKEFVKKRFPSCKMLDYALAVETVTTSKKDNLILNVDGAVAVCFVDLMRNCGAFSAEEAEDYLRMGVLNGLFVLGRSIGLIAHYLDQKRLRTGLYRHPWDDITYLLPSLGSSGSLGTEGRVEVQM

SEQ ID NO: 28939 - protein, 123 aa, Oryza sativa (japonica cultivar-group)
MGKNASRLAVAAVVVFALLLSLRQLEAADDVSVSCSDVVADVTPCLGFLQGDDDHPSGECCDGLSGLVAAAATTEDRQAACECLKSAVSGQFTAVEAAPARDLPADCGLSLPYTFSPDVDCSQ

SEQ ID NO: 28940 - protein, 288 aa, Thermus aquaticus
MILVNRETRVLVQGITGREGQFHTKQMLDYGTKIVAGVTPGKGGTEVLGVPVYDTVKEAVAHHEVDASIIFVPAPAAADAALEAAHAGIPLIVLITEGIPTLDMVRAVEEIKALGSRLIGGNCPGIISAHLPKIGIMPGHVFKRGRVGIISRSGTLRHEAAAALSQAGLGTTTTVGIGGDPVRRLTFKDLLPLFNEDPETEAVVLIGEIGGSDEEEAAAWVKDHMKKPVVGFIGGRSAPKGKRMGHAGAIIMGNVGTPESKLRAFAEAGIPVADTIDEIVELVKKALG

SEQ ID NO: 28941 - protein, 260 aa, Crocosphaera watsonii WH 8501
METYEFDVVIIGGGPAGCSCALYTSRADFKTVILDKNPAVGALAITHKIANYPGVAGDISGDGLLDVMREQAISFGTTYQRAQVFGIDVEGPLKKVYTPEGTFMGRALVLATGAMGRTSSLRGESEFLGRGVSYCATCDGAFYKEREVAVYGLNTEAVEEAQFLTKFASTVHWLTNKEPELEDTHVQQLLSQPNVKHWNFTRLLRVEGNEAGVTNILMKTKGGPKRVFSTSRGSFCLSKRFQTNYRFCQSSDRILRQWWG

SEQ ID NO: 28942 - protein, 850 aa, Arabidopsis thaliana
MRGLPNFYHSYTFFFFFLLILFPAYSISANTLSASESLTISSNNTIVSPGNVFELGFFKPGLDSRWYLGIWYKAISKRTYVWVANRDTPLSSSIGTLKISDSNLVVLDQSDTPVWSTNLTGGDVRSPLVAELLDNGNFVLRDSKNSAPDGVLWQSFDFPTDTLLPEMKLGWDAKTGFNRFIRSWKSPDDPSSGDFSFKLETEGFPEIFLWNRESRMYRSGPWNGIRFSGVPEMQPFEYMVFNFTTSKEEVTYSFRITKSDVYSRLSISSSGLLQRFTWIETAQNWNQFWYAPKDQCDEYKECGVYGYCDSNTSPVCNCIKGFKPRNPQVWGLRDGSDGCVRKTLLSCGGGDGFVRLKKMKLPDTTTASVDRGIGVKECEQKCLRDCNCTAFANTDIRGSGSGCVTWTGELFDIRNYAKGGQDLYVRLAATDLEDKRNRSAKIIGSSIGVSVLLLLSFIIFFLWKRKQKRSILIETPIVDHQLRSRDLLMNEVVISSRRHISRENNTDDLELPLMEFEEVAMATNNFSNANKLGQGGFGIVYKGKLLDGQEMAVKRLSKTSVQGTDEFKNEVKLIARLQHINLVRLLACCVDAGEKMLIYEYLENLSLDSHLFDKSRNSKLNWQMRFDIINGIARGLLYLHQDSRFRIIHRDLKASNILLDKYMTPKISDFGMARIFGRDETEANTRKVVGTYGYMSPEYAMDGIFSMKSDVFSFGVLLLEIISSKRNKGFYNSDRDLNLLGCVWRNWKEGKGLEIIDPIITDSSSTFRQHEILRCIQIGLLCVQERAEDRPTMSLVILMLGSESTTIPQPKAPGYCLERSLLDTDSSSSKQRDDESWTVNQITVSVLDAR

SEQ ID NO: 28943 - protein, 117 aa, Arabidopsis thaliana
  misc_feature (58)..(58): Xaa can be any naturally occurring amino acid
  misc_feature (66)..(66): Xaa can be any naturally occurring amino acid
  misc_feature (98)..(98): Xaa can be any naturally occurring amino acid
MALGATTKRTIGLAATLRRVVRPLVTDAGVESDTRRGGTGRVSGIQEGHFFGRGIKYXPVRTVTKXGSGKLGKGKINFVSTLKWENPLWGWPFTGDPXAKVGDFVFVLDPEKAVNFL

SEQ ID NO: 28944 - protein, 583 aa, Aspergillus oryzae
MRRSVLRAVESAKPLARAPRSVSRSFATVNEAGSKDPVELDQITTLPNGIRVATESLPGPFSGVGVYVDAGSRYEDESLRGVSHIMDRLAFKSTKKRSSDEMLEVLEGLGGNIQCASSRESLMYQSASFNSAVPTTLGLLAETIRDPLITEEEVLQQLGTAEYEIGEIWAKPELILPELVHMAAYKDNTLGNPLLCPEERLGEINKAVVDKYREVFFNPDRMVVAFAGVPHDVAVKLTEQYFGDMQGKKSSNGPVLSGTGIETTLSNSQSAVEEGQVPTIPQFTPSSTTSTTPASPKSESSLLSKLPFLKSLSGSQKGSVSPLDPSLVEPSTFNLTRPSHYTGGFLALPPIRPPANPMLPRLSHIHLAFEALPISNPDIYALATLQTLLGGGGSFSAGGPGKGMYSRLYTNVLNQHGWVESCIAFNHSYTDSGIFGISASCSPTRTPEMLEVMCRELQALTLDNGYSALQAQEVNRAKNQLRSSLLMNLESRMVELEDLGRQVQVHGRKVGVKEMCDHIDALTVEDLRRVARQVFGGNVQNKGQGTGKPTVVLQEGELEGYKLRSFPWEEIQERIARWKLGRR

SEQ ID NO: 28945 - protein, 139 aa, Rickettsia akari str. Hartford
MIYSINYFNMFIGSRDQVAGLQQKSIITQHIEDKMANNVTDSSFKKEVLESDLPVLVDFWAEWCGPCKMLTPIIDEISKELKGKVKVLKMNIDENPNISSEYGIRSIPTIMLFKNGEQKDTKIGLQQKNSLLDWINKSV

SEQ ID NO: 28946 - protein, 161 aa, Yersinia pestis biovar Medievalis str. 91001
MKYDTSDLCDIYHEEVNVVEPLFSNFGGRTSFGGKITTVKCFEDNGLLFDLLEENGLGRVLVVDGGGSVRRALINAELAELALKNEWEGIVVYGAVRQVDDLAELDIGIQAMAAIPVGAADEGVGESDIRVNFGGVTFFSGDHLYADNTGIILSEDPLDIE

SEQ ID NO: 28947 - protein, 963 aa, Aspergillus oryzae
MSTTAPSSASPSVVRSHSTTSRPPSYRPVVSSDNPHRTRSVAVRPATAHQSSPQHHHHHSQHYHSHSHSKSQSYDRRPPSNQAVFDNIARRDLEHPVSTRRSNSRERSQERPSTAYRAEPPSNKHHRNLSVQGHQRDSIDMAAAGPVMAEGVAGPQQIASGSRLHPGTMPSKRRTTITTPSGQWALGKTLGAGSMGKVKVGKNIETGEQVAVKIVPRQSTEEHRSSRDAERADRSKEIRTAREAAIVSLVNHPYICGMRDVVRTNYHWYMLFELVNGGQMLDYIISHGKLKEKQARKFARQIAGALDYCHRNSIVHRDLKIENILISKTGDIKIIDFGLSNLFSPRSLLKTFCGSLYFAAPELLQARQYTGPEVDVWSFGIVLYVLVCGKVPFDDQSMPKLHAKIKQGVFEFPQGLSAVTELGIMAECRSIISRMLVTDPKQRASLAEIMNHPWMNKGYSGPPENYLPHREPLQLPLDPEVIEKMTGFDFGSPEYITAQLTKILESEDYQHAVRTSIREHPAPNHGEKKRGMFDFYKRRNSTSRDTLSAPSAEAVQLGNDPLNAYSPLLSVYYLVKEKLEKERAEKSPGALGVPHSAGDAMLQMPDLPAPEAAHTNQYQVPGEKDNTRRARPRARTHGDDDLAEGVKNLNLAPGQGSPAPTASQPETPVKKESTAAGILRRFSTRRTKDRGRDPDRGRVSNQTPQKETRTGRTHASRTMSLGHARRESIQARRARRDAAREANVPEETDADISGAGTALESANEGEDLSKPVYLKGLFSVSTTSSKPLPVIRADIIRVLRQLSVDYDEIKGGFSCCHTPSIEIDKVVDVGPPSPDRQGHVSNHRRRISFGGFLGHDDGKEEIRHTPRSQRRTRAPDHSFVTNSEASEEYLAARDNNVVVGERVMGETTTRVQSDTGENLVLRFEILIVKVPLFSLHGIQFKKVSGGMWQYREMAKKILDALKL

SEQ ID NO: 28948 - protein, 289 aa, Wolbachia sp. t191
QSNLQGVNFIVANTDAQALEKSLCDKKIQLGINLTKGLGAGALPDIGKGAAEESIDEIMEHIRDSHMLFITAGMGGGTGTGAAPVIAKAAREARAVVKDKGAKEKKILTVGVVTKPFGFEGVRRMRTAELGLEELQKYVDTLIVIPNQNLFRIANEKTTFADAFQLADNVLHIGIRGVTDLMIMPGLINLDFADIETVMSEMGKAMIGTGEAEGEDRAISAAEAAISNPLLDNVSMKGAQGILINITGGGDMTLFEVDAAANRVREEVDENANIIFGATFDQAMEGRVR

SEQ ID NO: 28949 - protein, 356 aa, Callistephus chinensis
MAAPISLKWEEHSLHENKFVRDEDERPKVPYNTFSNEIPVISLAGIDGCRRAEICDEIVKACEDWGIFQVVDHGVDTKLLSDMTGLARDFFHLPTQEKLRFDMTGGKKGGFIVSSHLQGEAVQDWREIVTYFSYPIKARDYSRWPDKPNEWRAVTEEYSKVLMGLACKLLEVLSEAMGLEKEALTKACVDMDQKVVVNYYPKCPQPDLTLGLKRHTDPGTITLLLQDQVGGLQATRDGGESWITVKPVEGAFVVNLGDHGHYLSNGRFKNADHQAVVNSSTSRLSIATFQNPAPEAIVYPLKINEGEKSIMEEPMTFMEMYKKKMSTDLELARLKKLAKDKQQDLEVVKPIQNIFA

SEQ ID NO: 28950 - protein, 573 aa, Burkholderia xenovorans LB400
MSTPDTSVDAATPSELEIPFSSLEYRRHQMFPRLCAAEIASLRRFARPMSFKAGELIFETGQVALGLFVLLHGRVRIESRDSFGRSTVVTEHDDGHFMAEMAQLSGKPALIDGIALTDVETLVIEPERLRALIVADAQLGEHIMRALILRRLGLIEQGLGPVIVGNGDDARLIRLQGFLRRNAYPAMVIDARTDPDAIKLLGGMTTGPGDFPLVFCPNGYVLRAPDEAQLASCLGLVPTFEQSHVYDVAIVGAGPAGLAASVYAATEGLSVAVFDQRAPGGQAGASSRIENYLGFPTGISGQALAARAFQQALKFGAHLAIPGKVMDVSRHEDIFTLTLQDGQRISARTVVVASGAAYRKPTVPGFDRFEGRGTFYWASTIEARLVKGLDIVLMGGGNSAGQAVVFLANFARSIRVLIRGADLNASMSKYLIDRIGSLPNVSLCTRCVLRGLEGDESGLSGLHIHHEDEGADEIIPTRHLFLFIGADPKTDWLAASDVELDNRGFVVTGFARSEQGFSASSARYPLETSVPGMFAVGDVRSESAKRVAAAVGDGAAVVSQIHAYLSQFAKAIA

SEQ ID NO: 28951 - protein, 289 aa, Wolbachia sp. M36
QSNLQGVNFVVANTDAQALEKSLCDKKIQLGINLTKGLGAGALPDIGKGAAEESIDEIMEHIRDSHMLFITAGMGGGTGTGAAPVIAKAAREARAVVKDKGAKEKKILTVGVVTKPFGFEGVRRMRTAELGLEELQKYVDTLIVIPNQNLFRIANEKTTFADAFQLADNVLHIGIRGVTDLMIMPGLINLDFADIETVMSEMGKAMIGTGEAEGEDRAISAAEAAISNPLLDNVSMKGAQGILINITGGGDMTLFEVDAAANRVREEVDENANIIFGATFDQVMEGRVR

SEQ ID NO: 28952 - protein, 485 aa, Roseovarius nubinhibens ISM
MTDTTRQTHTVEKIGGTSMSRLRELRDTLLIGTRKPADLYNRVFVVSAFGGITNLLLEHKKSGEPGVYASFANDDTAHRWHDQLDRVADAMKEAHAAILDHKADLLEADRFVDERIHGARGCLIDLQRLCAYGHFRLDQHMGQTRELLSGLGEAHSAFTTTLLLQRAGVNARFVDLSGWRDEGNVSLDERIRDAFAGIDPASEMPIVTGYAQCAEGLMGEYDRGYSEVTFSRLAALTQAREAIIHKEFHLSSCDPNLVGPDAVRKLGRTNHDVADQLSNLGMEAIHPKAAKTLRQAGVPLRVTNAFEPDDPGTLIDDLPADSAAVEIVTGLDIVSLEVFEQDMVGVKGYDAAILDVLARHNVRIVSKVSNANTITHYLDGSLKTLRRVEKDLATLYPAAEITTRRLSLVAAVGRDLSGLSVLTRGLQAIAAAGLEAIGATQGPRNVDVQFILDRADMEPAIRALHGALIEKPQAQSVRQELSHAA

SEQ ID NO: 28953 - protein, 467 aa, Frankia sp. CcI3
MSDTPTPDLTCSAGTAGAPRNKPVPGARAAHLLAAGGVSGESLLDGTARRTVLPGGLRVITERVPGVRSVAIGVWVAVGSRDETPVTAGCSHYLEHLLFKGTPSRDALTISASVEAVGGDINAFTGKEYTCYYVRVLDSDLAMAVNVIADMVTNSLVTADDVEAERGVILEEIAMYEDDPGDLVHDVFAAAMLGSSVLGRPVLGTTESIEGLGRETIADYYRSRYVPPAMVVSIAGNLAHDRALALVAEAFADRLTVSAEPFEVRGGSYDYPPPPGIVVTDRPTEQAHLVLGTRGLSRHDPRRYTLGVLSTALGGGMSSRLFQEIREKRGLAYSVGSFASHFADAGLFGVYAGCAPKRADVVLELAREQVRQIAEHGISAEELDRARGQNRGSMILGLEDTGSRMSRLGKSELVHGEVLSVDEIIARVDAVTLDDVTAIARELLDQSWALGVIGPFDDHDFSAAVAR

SEQ ID NO: 28954 - protein, 448 aa, Bacillus subtilis
MKHRYLPATEKDKQEMLATIGVSSIDDLFADIPENVKYKKEHQIKKAKSETELTRELTKLASKNRDTVQYASFLGAGVYDHYQPVIVDHVISRSEFYTAYTPYQPEISQGELQAIFEFQTMICELTGMDIANSSMYDGGTALAEAAMLASGHTKKKKIVVSKTVHPESREVLKTYAKGQYIDVVEVPAADGVTDLDALRQTVCENTAAVIVQYPNFFGRIEPLKDIEPIAHQGKSMFIVSANPLALGLLTPPGKFQSDIVVGDAHRFGIPSAYGGPHCGFFAVTKKLMRKVPGRLVGQTEDENGKRGFVLTLQAREQHIRRDKATSNICSNQALNALAASVAMTALGKNGVKDIARQNLLKANYAKQEAKKAGLTVMFDGPMFNEFVIKLDEPVRAVNKRLLAKGMIGGYDLGLTYPELDCHMLIAVTELRTKEEIDALIQELGDRHE

SEQ ID NO: 28955 - protein, 488 aa, Bacillus subtilis
MSNQDQALIFELSREGRIGYSLPELDVPEIELGDLLSDTYIRDEDAALPEVSELDIMRHYTALSKRNHGVDSGFYPLGSCTMKYNPKINEKIARIPGFAAIHPLQDEDTVQGALELLYDLSKHLEEITGMDEVTLQPAAGAHGEWTGLMMIRAYHEARGDFKRTKVIVPDSAHGTNPASATVAGFETVTVKSNEKGLVDLEDLKRAVNEETAALMLTNPNTLGLFEEQITEMAEIVHQAGGKLYYDGANLNAVLSKARPGDMGFDVVHLNLHKTFTGPHGGGGPGSGPVGVKQDLIPYLPKPVLVKKEGRFTFDYDRPHAIGRVKPYYGNFGINVRAYTYIRSMGPDGLKAVTENAVLNANYMMRKLAPYYDLPFDRHCKHEFVLSGKRQKKLGVRTLDIAKRLLDFGYHPPTIYFPLNVEECIMIEPTETESKETLDAFIDAMIQIAKEAEENPELVQEAPHTTIVKRMDETKAARHPVLRYEAEER

SEQ ID NO: 28956 - protein, 481 aa, Pseudomonas aeruginosa PAO1
MNGLPMNLIWFRCDLRTTDNSALLAAADGRPCLALYLLSPAQWREHDDAPCKVDFWLRNLGELQRQLAALNIPLLVRDCGHWRQAPEVIGRLCRELGVGAVHVNQEYGVNEERRDQAVGQRLREQGVAFHSHLDQLFFAPGSVLTRTGGYFQVFSQFRKVCHERLYQALPGVRPRPQPQPPHALASDPLPDAVPAFPRPADSLRRLWPAGEEVAQERLRDFADQHLADYHERRDFPALPGTSQLSPYLAAGVLSPRQCLDAALVANRGEFSGGQQGAATWINELLWREFYKHILVGYPRVSRHRPFREETEALRWRQAPAELEAWQQGRTGIPIIDAAMRQLLATGWMHNRLRMVVAMFLSKNLLIDWREGERWFMRHLIDGDLAANNGGWQWSASTGTDAVPYFRLFNPLSQSERFDPRGEFIRHWLPELAGLERKAIHDPSSLGLFAGVDYPRPMVDLKASRERALAAFRNLPPRDGRA

SEQ ID NO: 28957 - protein, 313 aa, Pseudomonas aeruginosa PAO1
MSSREIRIATRQSALALWQAEYVKARLEQAHPGLTVTLLPMTSRGDKLLDAPLAKIGGKGLFVKELETALLEGAADIAVHSMKDVPMDFPEGLGLYTICEREDPRDAFVSNTYASLEQLPAGSVVGTSSLRRQAQLLARRPDLQIRFLRGNVNTRLAKLDAGEYDAIILAAAGLIRLGFESRIRSSISVDDSLPAGGQGAVGIECRTADSDLHALLEPLHHTDTALRVTAERALNKRLNGGCQVPIACYAIREGDQLWLRGLVGQPDGTQLLRAEGRAPLAEAEALGVRVAEDLLEQGAEAILEAVYGEAGHP

SEQ ID NO: 28958 - protein, 432 aa, Candida glabrata CBS 138
MTVLVPRLLPTAMKLRPLWSQASRTFATSMRLNAAAFDRSKPHVNIGTIGHVDHGKTTLTAAITKTLAKNGGADFLDYSSIDKAPEERARGITISTAHVEYETAKRHYSHVDCPGHADYIKNMITGAAQMDGAIIVVAATDGQMPQTREHLLLARQVGVQRIVVFVNKVDTIDDPEMLELVEMEMRELLNEYGFDGDNAPIIMGSALCALEGRQPEIGEQAIMKLLDAVDEYIPTPERDLNKPFLMPVEDIFSISGRGTVVTGRVERGNLKKGEEVEIVGHNTTPLKTTVTGIEMFRKELDQAMAGDNAGILLRGIRRDQLKRGMVMAKPGTVKAHTKILASLYILSKEEGGRHSGFGENYRPQMFIRTADVTVVMKFPESVEDHSMQVMPGDNVEMVCELVHPTPMEVGQRFNIREGGKTVGTGLITRIIE

SEQ ID NO: 28959 - protein, 490 aa, Rhodopseudomonas palustris CGA009
MFSFDALLQAIARQTVLCVGDLMLDEFVYGEVSRISPEAPAPVIAVQRSETNIGGAGNVARNIAAIGARCIFVGLIGDDATGRFLESELGSESRIEPVLVCDGSRPTTRKVRFVSEHFSTHMLRADWETASPAAADIEQRLLDAILPQLARADIVLLSDYAKGVLTARVIRDTIDAAKKLGKRVIVDPKSANFAIYRGATLLTPNRKEFTAATRSAAATDDEIAAAAQDAMALAECEAMLVTKSEHGMTLVPRGGEPIHVPALPVKVRDVSGAGDTVAAVLAVVLASGANWATAMRAASAAAAVAVSKNGTAVVTPAELRRRILPHASLAAEEKIIGSDEELDERLKQWRREGLRVGFTNGCFDILHPGHVKVLTAARGACDRLIVGLNSDASVRRLKGESRPVQHERARAEVLAALEAVDLVAIFEEDTPLRLITRIEPSVLVKGGDYTREQVVGHEIVAAKGGDVLLVDVLPGFSTTSLVARAREGQS

SEQ ID NO: 28960 - protein, 536 aa, Phanerochaete chrysosporium
MGLTQAQRLVLGQLARLVAPALAVCVLLAAARRTQLVRAPVWADALIALIAIPLFHVGRAHWRVDVLQLVDEAYRRGFLSDYFYEKFGELGHTYNFYVLWDMDYCTEDAAVIKAVLATDFNNWVKGERFDSYMHSVLGTGVFNADGELWKFHRSMTRPFFARERITDFETFNRHAEEAILKMKERLREGFAVDFADLISRFTLDAATEFLFGACTTSPRRSARRRTQSRIARASRTDTPMRTVDRYLTPIIERALAMSRAAKQAPQGEKEEVADGETLLDHLARYTTDPTILHDEILNIMIAGRDTTGGTLTFVIYFLTQHPDVLQRLRQEILDVVGPSNLPTYDDIKQMKYLRAVLNETQRLYPPVPWNMRYAVEDSIVPNSEPEGKPWFIPAGASVSYSVHCMHRRKDYWGPDAEEFDPDRFLDERLHKYLTPNPFIFLPFNAGPRICLGQQFAYNEMSFFLVKLLQTFEDISFERDAFEPNALPPAEWAKFPGRKGKEKFWPRAHLTLYSEVRMTAGGMWVKMREAQAMGQVA

SEQ ID NO: 28961 - protein, 801 aa, Staphylococcus aureus subsp. aureus MRSA252
MAKQKLVMIGNGMAGIRTIEEILERANDLYDITVIGKEPYPNYNRIMLSNILQNKMTVEETIMNPYEWYEEHDIKLITNDPVVDVDRANQNVTTANGIEVAYDKLIFATGSKAFVIPVPGSTLPSVIGWRTIDDTEQMMNIAKTKKKAIVIGGGLLGLECARGLLDQGMEVTVLHLAEWLMEMQLDRKAGNMLKADLEKQGMKFEMQANTTEILGEDDVEGVKLADGREIPTDLVVMAVGIRPYTEVAKESGLDVNRGIVVNDVMQTSDSNVYAVGECAEHNGKVYGLVAPLYEQGKVLADHLTNKETNGYKGSTTFTSLKVSGCDLYSAGQIVENAEIKGIEIFNSVDNNYKKIFLKDGNVVGAVLYGDIDDGSRFYNMMKKGESTEDYTLVSLLTKGGEEASLSIADMADDETICGCNGVDKGTIVNAITENGFTTVEEVTAKTKAGNSCGKCKPQIAQILQHTLGDDFVAAKPAGICGCTDLTRDQIVTQIRAKGLKTSKEVRHVLNFKNKGGCPKCRPAINYYLNMVYPHDHEDERESRFANERYHANIQNDGTFSVIPQMRGGVTDADQLIRLGEVAKKYHVPLVKVTGSQRVGLYGVKKEELPNIWEDLGMRSASAYGKKTRSVKSCVGKEFCRFGTQYTTRLGIRLEKTFEYIDTPHKFKMGVSGCPRSCVESGVKDFGIISVENGFQIYIGGNGGTEVEKAEFLTTVETEDEVIKLCGALMQYYRETGIYAERTAPWLRRLGFENVKEVLLDPERQNELFERIMDAKKAVEAEPWEAITSNAQARKIFEVEKV

SEQ ID NO: 28962 - protein, 904 aa, Xanthomonas campestris pv. campestris str. ATCC 33913
MNEYRSSLVFATPDVPLRDDVRRLGALVGDLLAEQVSADFLEEIERIRTTAIARRESDTPPAGLLSLLEGREPRAAEALVRAFSTYFQVVNIAERVHRIRRRRDYQRSGTDTPQPEGLHDALRRLKAQGVTLDELSEWLPRIDVEPVFTAHPTEAVRRALLEKEQLMVASLVDNLDGMRTPNERATDAARFRMALTASWQTADSSPVRPTVEDEREHVGFYLTQVLYRVIPVMYETLEHAIEETYGSTLALPRLLRFGTWVGGDMDGNPNVDAHTIAGTLDAQRRAVLDRYLNELWQLASLLSQSTTLVAVSPALSAQLERYQALLPDAAARSRPRHGDMPYRLLNDLMRARLQATLDDADGAYAAPAELEHDLQLILDSLEVNKGLHAGWFAVRRLLWRVRSFGFHLARLDVRQESSVHARAVADALGQADWDSQDATHRAGLLGPYASGEQALPQVDDEGNARLDAVFAALADARTRHGADALGSYIISMAHNRADVLTVLALARRGGLVDDAGAVPLDIVPLFETVDDLRGGTGTVQDLLADPVYRQHLRARGDTQMVMLGYSDSGKDGGIAASRWGLQRAQVELLEAAAELGVRLTFFHGRGGSIVRGGGKTTRALDAAPRGSVDGRLRVTEQGEVIHRKYGIRALALRSLEQMTGAVLLSSLRPRAPEPREDAWRPVMDLVAERSTVAYRGFVGAPDFMQYFRLATPIDVIERMTLGSRPSRRLGQDAALSNLRAIPWVFAWSQARAVIPGWYGVGSGLQAAVEAGHEDSLREMAQDWPFFRTFLDDIAMVLSKGDLNIAELFSRLAGPLHARFFPRIRDELALTKHWVKTLLGQRSLLQHDPRLALSIRLRNPYIDPISVLQVDLLQRWRATDGEDEELLRALVACVNGVAQGVQNTG

SEQ ID NO: 28963 - protein, 282 aa, Ustilago maydis 521
MVKTVSVEVDTILFDMDGTLIDSTPAVNATWASFAQQYNLDLSFVMQTCHGYRTVENLRRFIPSISDAELPKEVERFESNILVVAKQNAAKGQGGSIVAMPGAKELLDQINSGRPDAAVEKGNYGWAIVTSATKAYAQQGFASAGVSSPPEVFITSDLCTKGKPDPQPYLMGAEKTGQDISRCLVVEDAPPGVRAGKRAGAKTLALRTTHDGEKMQQEGADYIVEDLRSVQAKWKHDGSGLVLTIQAEQPEKGEAKGISELAKQIQLQNDPTSNTHAVNGQP

SEQ ID NO: 28964 - protein, 920 aa, Streptococcus pyogenes M1 GAS
MPLKKLESSNNQDIIAEEVALLKEMLENITRRMIGDDAFTVIESIMVLSEKQDYIELEKVVANISNQEMEVISRYFSILPLLINISEDVDLAYEINYQNNTDTDYLGKLALTIKDLAGKDNGKDILEQVNVVPVLTAHPTQVQRKTILELTTHIHKLLRKYRDAKAGVINLEKWRQELYRYIEMIMQTDIIREKKLQVKNEIKNVMQYYDGSLIQAVTKLTTEYKNLAQKHGLELDNPKPITMGMWIGGDRDGNPFVTAETLCLSATVQSEVILNYYIDELAALYRTFSLSSTLVQPNSEVERLASLSQDQSIYRGNEPYRRAFHYIQSRLKQTQIQLTNQPAASMSSSVGLNTSAWSSPASLENPILAYDSPVDFKADLKAIEQSLLDNGNSALIEGDLREVMQAVDIFGFFLASIDMRQDSSVQEACVAELLKGANIVDDYSSLSETEKCDVLLQQLMEEPRTLSSAAVAKSDLLEKELAIYTTARELKDKLGEEVIKQHIISHTESVSDMFELAIMLKEVGLVDQQRARVQIVPLFETIEDLDNARDIMAAYLSHDIVKSWIATNRNYQEIMLGYSDSNKDGGYLASGWTLYKAQNELTAIGEEHGVKITFFHGRGGTVGRGGGPSYDAITSQPFGSIKDRIRLTEQGEIIENKYGNKDVAYYHLEMLISASINRMVTQMITDPNEIDSFREIMDSIVADSNIIYRKLVFDNPHFYDYFFEASPIKEVSSLNIGSRPAARKTITEITGLRAIPWVFSWSQNRIMFPGWYGVGSAFKRYIDRAQGNLERLQHMYQTWPFFHSLLSNVDMVLSKSNMNIAFQYAQLAERQDVRDVFYEILDEWQLTKNVILAIQDHDDLLEDNPSLKHSLKSRLPYFNVLNYIQIELIKRWRNNQLDENDEKLIHTTINGIATGLRNSG

SEQ ID NO: 28965 - protein, 322 aa, Streptomyces avermitilis MA-4680
MPKTQSGTSNRTRSTTAGGSARGKWNAGDIPDQTGRTAVVTGANSGLGIATVEALARAGAHVVLAVRDLERGEAAAAGVHGSVEVRRLDLADLASVREFAAGWQGDLHLLINNAGVMNIPEASTKDGFEMQFGTNHLGHFALTNLLLPRIKDRVVTVSSGAHRMPGSPYIHFDNLNLTGEYAPLTAYSQSKLANLLFTLELQRRLAEAASPVRALAAHPGWAATNLQSHDGSALRRALMRVGNRFIAQDNRAGALPTLYAAVQDLPGASYVGPDGFGEMRGGPTLVGRSAAAGDPVSARRLWTASEDLTGVTFPRLTAAVSA

SEQ ID NO: 28966 - protein, 545 aa, Gloeobacter violaceus PCC 7421
MNTAELLVQCLENEGVRYIFGLPGEENMQFLEALQSSSIQFVTTRHEQGAAFMADVYGRLTGRAGVCLSTLGPGATNLMTGVADANLDRAPLVAITGQVGTDRMHVDAHQYLDLVAMFAPVTKWSTHIVRPSNTPEIVRKAFKIAQAEKPGAVHIELPENIASMAAIGEPLRISDNHDIFASFSSITRAAELISQADNPLILVGNGAIRCNASAALTEFAARLNIPVANTFMGKGVIPYTHPLALWAVGLQQRDYISCGFDRADLVIAIGYDHIEYSPKKWNPMGDIPIVHVGRTAAEVDSSYIPQVEVVGDISDSLQEILSRADRQGKPDPYAIQLRDDIRAEYTEYAHDTGYPVKPQKIIYDLRQVLGSEDILISDVGAHKMWVARHYHCDRPNTCIISNGFAAMGIAIPGAVAAKLVHPHRKVVAVTGDGGFMMNMQELETALRIGTPFVTLIFNDGGYGLIEWKQQTHFNRSAFVRFGNPDFVRLAESMGLKGYRVEAGDELLPILKTALEQEVPAIIDCPVDYRENMELSQRVMQLSCAV

SEQ ID NO: 28967 - protein, 199 aa, Triticum aestivum
MASVTSRCSGLLLPDLRPGLAGLRSRSRPPSSPRVSLRAGRRRPRTLSCVAPPDSAEPKTDEQLVKAELGEEKPQPSSSRTSTPQEAAAEPPVPDRGLNRRIAVLTTLAAVGLFGSQRLQLGGFSLKDLAANAVPYEKALSNGQPTVVGFYADWREVCPELTPNIYKIDPRTTDRINFCHVAMSTITTGGTKSLDGVWG

SEQ ID NO: 28968 - protein, 478 aa, Oenococcus oeni PSU-1
MDIFRKKDVGEILKHSTPLKRTLRTWDLTFLGIGAIIGTGIFVLTGKGALTAGPAISVSFLVAAICCGFAGLCYAEFASMAPVAGSAYTYSYIAFGEIIAFIIGWDLILEYTLGAATVSVGWSGYFANLLGNLGIHIPTVLTAAAGTTAGVTSYFNLPAFLIVLLITWIISIGITQTKRANDTMVIVKLAVILLFIVCTIWFIKPHNWQPFSPYGLYSFHNGTAAGIIPAASIVFFSFIGFDSVSSSAEETINPSKTLPRGILLSLFISTVLYIIMTLIMTGVVKFTVFAKYLNAPVLAVLHSTGQTWLSIIVSIGAILGITTVILVQLYGQSRISYSMSRDGLFPKFFGDVNMKYQTPFKGTWFFGIITAIAGGLINLNILAELVNIGTLTAFILVSAGVLWMRHSHPEVHRGFKAPGVPFTPIIAIIFCLVLIAGLNWETWIRFIVWFAIGMILYFGYAKKHSKLNSFKPQDKGAD

SEQ ID NO: 28969 - protein, 493 aa, Pseudomonas putida KT2440
MTLVRFQMCIDGQWRDAQSGKTFDSLNPATAQAWAQLPDADEADVELAVQAAQRAFDSKAWRSITATARGKLLRRLGDLIAENKEHLAQLESRDNGKLIRETRGQVGYLPEFFHYTAGLADKLEGGTLPLDKPDLFAYTVHEPIGVVAGIIPWNSPLYLTAIKLAPALAAGNTIVLKPSEHASATILELARLALEAGFPAGVVNVVTGYGPSTGAALTRHPLVRKIAFTGGAATARHVVRSSAENFAKLSLELGGKSPNIIFADADLDSAINGAVAGIYAASGQSCVAGSRLLVQDEIFDEFVERLIARAKRIRIGNPQDDASEMGPMATAQQLAVVEGLVAAAKAEGAKLHMGGKRADVEGDGWFYEPTLFECDSNAMTIMQEEVFGPVAAVIRFKTEEEALAMANDSQFGLAAGIWTRDLGRAHRLARDVRSGIIWVNTYRAVSAMAPIGGFKNSGYGRESGIDSVLAYTELKTVWINLSTAPMPDPFVMR

SEQ ID NO: 28970 - protein, 396 aa, Gluconobacter oxydans 621H
MAKAKFERTKPHCNIGTIGHVDHGKTSLTAAITKVLAKTGGATYSAYDQIDKAPEERARGITISTAHVEYETADRHYAHVDCPGHADYVKNMITGAAQMDGAILVVSAADGPMPQTREHILLARQVGVPALVVFLNKVDQVDDPELLELVEMEVRELLSSYQFPGDDIPIVKGSALVTLEDGDPSIGEDRVLELMTQVDAYIPQPERPVDRPFLMPIEDVFSISGRGTVVTGRVERGVVNVGDEVEIVGLKDTVKTTVTGVEMFRKLLDRGEAGDNIGALVRGTKREDVERGQVLAKPGSITPHKKFKAEAYILTKEEGGRHTPFFTNYRPQFYFRTTDVTGVVTLPEGTEMVMPGDNVAMDVELIAPIAMDEGLRFAIREGGRTVGAGVVSSITA

SEQ ID NO: 28971 - protein, 246 aa, Brassica napus
MNIAHTIFGVFGNATALFLFLAPSITFKRIIKNKSTEQFSGIPYPMTLLNCLLSAWYGLPFVSKDNTLVSTINGTGALIERVYVLIFLFYAPKKEKAKIFGVFTAVLAVFATVALVSLFALHGNARKLFCGIAATVFSIIMYASPLSIMRLVIKTKSVEYMPFFLSLFVFLCGTSWFIYGLIGRDPFVAIPNGFGCALGTLQLILYIIYCGNKGEKSAEKDDKSLEMKGEEKKQNVVNGKQQEQQV

SEQ ID NO: 28972 - protein, 393 aa, Pseudomonas aeruginosa UCBPP-PA14
MLSNAQRALIKATVPLLETGGEALITHFYRTMLGEYPEVRPLFNQAHQASGDQPRALANGVLMYARHIDQLQELGPLVAKVVNKHVSLQVLPEHYPIVGTCLLRAIREVLGEQIATDEVLEAWGAAYQQLADLLIEAEESVYAASAQADGGWRGVRRFHVARKQAESEEITSFYLEPVDGQPLLAFQPGQYIGLRLDIDGEEVRRNYSLSAASNGREYRISVKREAGGRVSNHLHDRVAEGDELDLFPPAGDFVLRDSDKPLVLITAGVGITPALAMLQEALPQARPIRFIHCARHGGVHAFRDWIEDVSAQHEQVEHFFCYSEPRVGDSPDAEGVLSREKLADWLPQERDLDAYFLGPRPFMAQVKRHLADLGVPSQQCHYEFFGPAAALDA

SEQ ID NO: 28973 - protein, 573 aa, Burkholderia xenovorans LB400
MASNTIAAYLARTLAAAGVQRIWGVTGDSLNGLAYSLDQVGSIRWMHTRHEEAAAFAAGADAASSGRLAVCAGSCGPGNLHLINGLFDCHRNHQPVLAIAAHIPSSEIGLGYFQETHPQELFKECSHYVELVSSAAQFPRVLARAMRTAVEERGVAVIVLPGDVALSEGPSEAPSWTESAPPRIVPAEADLDRLAALLNASDAVTIMCGSGTQGAHDEVVALADTLGAPVVHALRGKQFIEYDNPYDVGMTGLIGFSSGYHAMMSCDTLLLLGCDFPYRPFYPPDAKIIQIDWKGSQLGHRAPLALGLVGTVKETVAATLPKLQRKTDRGFIDNARKHYASARKGLDDLATPAGAGRPIHPQYLAKMIDESASDDAIFTADVGTPTVWAARYLTMNGKRQLHGSFNHGSMANAMPQALGAQGAHPGRQVVSLSGDGGLSMLLGDLLTARQLDLPIKVVVFNNSLLGFVSMELKAGGYLDTNVDLAKTDFAAIAKGAGIFGLRVEESEDVAGALRQVFDHPGPALLDVVTSKHELAMPPTIELAQAKGFSLYMMRAILNGRGDEIVELARTNLR

SEQ ID NO: 28974 - protein, 66 aa, Taraxacum officinale
NSGGGGGAGSGGNDVELLSKTLQVEHKLFYFDLKENPRGRYLKISEKTSATRSTIIVPFNGISWFF

SEQ ID NO: 28975 - protein, 115 aa, Yersinia pestis biovar Medievalis str. 91001
MLYLFRGRREFDLIREGANMKLVTVVIKPFKLEDVREALSSVGIQGLTVTEVKGFGRQKGHAELYRGAEYSVNFLPKVKIDIAIADDQLDEVIDVISKAAYTGKIGDGKIFVAEL

SEQ ID NO: 28976 - protein, 303 aa, Mycobacterium sp. KMS
MLGKIGDVQGHGPKLERVTFPDKSVASTLEGGLSVSDAQVTEKQPDALVEQRGHTLVVTLNRPESRNALSTEMLSIMVDAWDRVDNDPEIRSCILTGAGGYFCAGMDLKAATAKPPGDSFKDGSYDPSRIDGLLKGRRLTKPLIAAVEGPAIAGGTEILQGTDIRVAGESAKFGISEAKWSLYPMGGSAVRLVRQIPYTIACDLLLTGRHITAAEAKEYGLIGYVVPDGTALDKALEIAEVINNNGPLAVQAILRSIRETEGLHENEAFKIDTKIGIEVFLSEDAKEGPRAFKEKRAPNFKMK

SEQ ID NO: 28977 - protein, 225 aa, Photobacterium sp. SKA34
MNQISLLAEFGSPITRVENALNALRRGLGVMLLDDENRENEGDLIFSAEHITATQMALMIRECSGIVCLCLTEKHVKQLDLPAMVENNNSANKTAFTVSIEAKEGVTTGVSASDRVTTIKTAIALNAQPSDLARPGHVFPLCANEKGVLGRRGHTEGTIDLMTLAGLEPVGLLCELTNIDGTMAKADEVVYFAKQHNMPVLTIEDIVAYRLQQKKDKSQELEMVL

SEQ ID NO: 28978 - protein, 470 aa, Burkholderia vietnamiensis G4
MKAESNGRPAAGVKSSGQPALQQTLGTWQLWGIAVGLVISGEYFGWSYGWASAGTLGFVITALFVAAMYTTFIFSFTELTTSIPHAGGPFAYARRAFGPTGGYLAGAATLVEFVFAPPAIALAIGAYLHVQFPGLEPKHAAMGAYLVFMALNIVGVQIAATFELVVTLFAIFELLVFMGVVSPGFAWSNFMKGGWAGADHFSMGAFHGMFAAIPFAIWFFLAIEGVAMAAEEAKNPKRSIPIAYVAGILTLVVLAIGVMVFAGGAGDWTKLANINDPLPQAMKYIVGANSGWMHMLVWLGLFGLVASFHGIILGYSRQIFALAREGYLPEWLGKVHPRFKTPHRAILAGGVVGIAAIYSDELIQFGGQTLTANIVTMSVFGAIVMYIVSMAALFKLRRSQPNMARPFRAPMYPLFPAFAIVAALVCLGTMVYFNGLVAMVFIAFLAVGYAYFIATRSQRASAPADVLLEE

SEQ ID NO: 28979 - protein, 124 aa, Nostoc punctiforme PCC 73102
MCANFDRHRMETAMSKAVITITDAEFETEVLKAEQPVLVYFWASWCGPCQLMSPMINSAASKYSDRLKVVKMEIDPNPLTVKQYQVEGVPALRLFQGQEVLISTEGVIGKDKLLELLDTHLNSN

SEQ ID NO: 28980 - protein, 946 aa, Oryza sativa
  misc_feature (344)..(344): Xaa can be any naturally occurring amino acid
MASSIAMSLRSLAATDAFLPKPSPSSAPFLLLLSPSTPRLRLHLHLRSTRRLPLAPLAASDSFESASSSSAAALDFAEPGAAEESDVPEESDQEEEGYAPEAEEEAEADEEVEEEAVEASAEVAEEAEDVEEVGEYVEPPEEAKVYVGNLPYDIDSERLAQLFEQAGIVEVSEVIYNRETDRSRGFGFVTMSTVEEAEKAVEMFHRYDVDGRLLTVNKAAPRGARVERPPRQFGPSFRIYVGNLPWQVDDSRLVQLFSEHGKVVDARVVYDRETGRSRGFGFVTMATQEELDDAIAALDGQVSSGYAVLSEETIISYVGFRCICGWPNLPPDLLREISGQLHDXVDLSRFHTVCTAWRDMVRLPAAEPQCPALLPWLVARGWPGCFSRSHLRSIFSNATPAWHSPRTTTRDMWLASTDGAGVWVLTADGDRLVDPLTGATVRRLPRLPRTSNNDHVCYIDGVVCGDGTIVAYATSEGFKHTSQIEAAILRPGDTAWTTVESKGMNYSALGYGCCTTYHQGGVVFADLYQTFVARVLVDDAGGGGRVVESRTRRWPPDYGFLYKRLLSTYTFEFRGKLMSACVEIPWQSSAYQIDAAALSVSLYTLGTAAAAGDGDELAHLWVRAADGGRLLGEHALFLGCPTSFAVDAARFGAGGEVSGGCAYFVIWTMPDVCHVYKYSFHDDAATPMAELPFEWTFMIKRTLWFLPQYSSVAPTPTQASYEISFFSFVSENVFRHPEIRERLIRHGERPKTFKIKLNNLTPRARLGSSGDSWLRGEFRDHGYVIDANVHYRNGAIFGVVTMTTVQKPADIVAAFDKRGFLDLHPLLAVEFAEQQPRQEWILTEAALAIAPTTVHSFSPKDFSIYVGNLRWDVDRLRLLKFFGEHGRVLVAQVVCDRQTGRSRGFGFVSMATLREPDDVIASLNGQIMDGRPMRVSFAKWQPRLGY

SEQ ID NO: 28981 - protein, 472 aa, Escherichia coli K12
MTTHLVWFRQDLRLHDNLALAAACRNSSARVLALYIATPRQWATHNMSPRQAELINAQLNGLQIALAEKGIPLLFREVDDFVASVEIVKQVCAENSVTHLFYNYQYEVNERARDVEVERALRNVVCEGFDDSVILPPGAVMTGNHEMYKVFTPFKNAWLKRLREGMPECVAAPKVRSSGSIEPSPSITLNYPRQSFDTAHFPVEEKAAIAQLRQFCQNGAGEYEQQRDFPAVEGTSRLSASLATGGLSPRQCLHRLLAEQPQALDGGAGSVWLNELIWREFYRHLITYHPSLCKHRPFIAWTDRVQWQSNPAHLQAWQEGKTGYPIVDAAMRQLNSTGWMHNRLRMITASFLVKDLLIDWREGERYFMSQLIDGDLAANNGGWQWAASTGTDAAPYFRIFNPTTQGEKFDHEGEFIRQWLPELRDVPGKVVHEPWKWAQKAGVTLDYPQPIVEHKEARVQTLAAYEAARKGK

SEQ ID NO: 28982 - protein, 306 aa, Zea mays
MDGGGGGGGGGGGVGAGVMVGGGVVPGGGGGDVELVSKTLQFEHKLFYFDLKENPRGRYLKISEKTSATRSTIIVPIDGVAWFLDLFDYYIRTDERDVFSKELRLQTKVFYFDIGENKRGRFLKVSEASVNRNRSTIIVPAGSSGEEGWEAFRSVLLEINNEATRLYVLPNHPNQQHMEPPERLPGLSDDVGAGFIAGHGSQSASGPEVDVERLVDLPPQEEISGMGMSKVIRADQKRFFFDLGSNNRGHYLRISEVAGVDRSSIILPLSGLKQFHEMVGHFVDIMKDRLEGMTGANVRTVEPSQR

SEQ ID NO: 28983 - protein, 1410 aa, Thiomicrospira crunogena XCL-2
MLKHSLSALLLLSALLPFSAQALTLNSSEQQWIKDHPQITLGSDYNWPPYDFKDSAGKHNGISADILDRIRQITGLKIKVRSGVWSTILEQAEQGTLDGLACAVKTPDRAEHLYFTAPYTSMPLGIFMQDKSTSTSIKTMDDLTTQTVTINRDSYMHEWLKQNYPHLKLYLVNSNAEALEAVSFGKANVYIGNMAVATYLIKKNYLTNIQAVAKINHFKTDTAIAIHKDKPILFGIIKKALKEISQKERNTILEKWFIKSKTTYIDLSNQEIAWIKAHPVIKVAGEPDWAPFDFVADNTYQGIANDYLNLIAQKTGLNFHIDIHSWEQNLTLLKKQQVDVLPAAYFSAERTSYAKFTTPYYKPLTYFFVRHDLKASSLNDLENTTIAMPKGYLHIDFLKQRFPNITILETDTLNEAINAVIQNKAQVLYENYAVLSYILSQSGINTIKPLAPAKQANQSLHFMIRDSAPELASIMNKALASITPQERKDIEERWLTIAPNKINITLTPAEQNWLNQHAQVSFTGYPDHLPYEGFKSNANQPIQHQGIVSDFIHSLESHLPLQFIPRAYKSWPDTLKAIHQTPVDIISAEIDTPELLAQYRPIIPYLTTPMVIVMKNQDTFVNTLRQLTTETIALVSNDATSEKLLKQYPNQHFKTWPNAKSVLEAVAFNKADAAILSLAKASYLIKQNHYTSLKIVGKTDVQKQFTLFVNKRYPELFSILQKSMPAITEEHGSGILSQWTKIKFASKFDYALFFQMFSFLLVVIGIIFFWNRRLTKEVKQRLQAEKRLKENETQLQGLIDSIPLMIMVTNHQGKILSANRQTLKNYQLNFQELSELNSTTFYSDPDDRQQILNALQAGEQIHQKIISMKDADGIPRKMMLSVLPIHFNQQPANLSIAIDLTERIQFEKELQQAKEQAESASQTKSQFLANMSHEIRTPMNAIIGFTELLNEQVTEPRLKRYIRTIQAAGKTLLTLINDILDLSKIEAGKMDLDKKAVNPHSLFDEIGQIFMINIQRKGLDFLVDIDKTLPEGLLLDGVRLRQILFNLLGNAVKFTEQGYVKLKVSACDVDEHHSKLDILIQVSDTGIGIPEDQQARIFNAFEQRENQDVQKFGGTGLGLAITQRLVNMMGGDIWVESTPGQGTTFNLLIHHVDISATNQSDQPNSDERPVPQLIEFHPTTILVVDDIDDNRALIKQNFVDTDVTVYEAQNGEEAINCFHSEKGISLILMDLRMPIMNGYQAAEIIKQKSPSTPIVALTASVMTETADAPKRQHFDDYLRKPVFKADLFNILKKYLPHEILTPTPEFSETQEVLSDKAKLNAPQFLEAIQEQLSPTQKTILKTNNIEEIQRFAQTCEALADQYDSKTLKTYATQLLEATESFDIKAMQQLLKYYETLEARLDKLLNDAISP

SEQ ID NO: 28984 - protein, 199 aa, Capsicum chinense
VLLENYSLGKSLTQRQIVQLASKGEQRNAINIVLTASDVAVDGFCVNRCGTHGSSKGAIIKGKTYKFAYIWVGNSETLCPGYCAWPFPQPIYGPQSPPLGAPNNDVGVDGMVINLASLLAGTATNPFGNGYYQGEADAPLEAAFACPGVYAKGAYPGYAGDLLVDKTTGASYNAHGTNGRKYLVPALFDPFTSSCSTLV

SEQ ID NO: 28985 - protein, 634 aa, Oryza sativa
MAIPGAYAHAVQALATGILFVVVSLVLDHVEGRHHKCPSFSCGHLKGVSAPFRRAADPPGCGSKSYELVCSDTNATILIDNATYHVNEINYDYRRFWVVDANIAGSTCPLPQWNHLLDQYKRKVSGHRIEIELAPGAYNHAYFVRCSREVKDNGIYRPVTCASSNYSFIYVLLSSDSDNPGYIESLEPSCGYLAMTLLGDWRSTTVPRNASYEDVKKFMRGGFTVRFPVNYGAGNIKECLMDSISLSRLLLTPVHCMHYAVLCRFVLVPLAILTFLAHKYWKTRLAIDAVEKFLQMQQVLGPTRYAYTDLTAVTSHFRDKLGQGGYGSVYKGVLLSGDVHVAVKMLNGTSTYDGEEFISEVSTIGRIHHVNVVRLVGFCSEELRRALVYEYMPQGSLDKYIFSSERSFSWDKLNEIAIGIARGINYLHQGCDMQILHFDIKPHNILLDDNFVPKVADFGLAKLYPRNKSFVSDRALRGTVGYIAPEMVSRSFGVISSKCDVYSFGMLLLEMAGGRRNADPNTNPNASQSYYPSWVYGQLTGEQVGETSGAADMHELQKKLCLVGLWCIQMKSHDRPTMSETIEMLEGDVNALQVPPRPFFCDGDFMPNVMDSYLHSSELTAISEDDGAIEFASN

SEQ ID NO: 28986 - protein, 79 aa, Cucumis melo
TGAPVYLAAVMEYLAAEVLELAGNAARDNKKNRIIPRHVLLAIRNDEELGKLLAGVTIASGGVLPNINPVLLPKKTDKG

SEQ ID NO: 28987 - protein, 156 aa, Methanosarcina acetivorans C2A
MPKVAVGGTFQYLHDGHARLIEKAFEIAGDGKVYIGLTSDEMLQKNHSIDNYENRRVRLLEYIDEMEIPKEKYEITRLNDPCGPTVEEDFDYIVVSPETYPVALKINRIREKKGKNPLEIVYVEYVMAEDGTPISSTRIAKGEIDRHGKMKRESQA

SEQ ID NO: 28988 - protein, 216 aa, Triticum aestivum
  misc_feature (192)..(192): Xaa can be any naturally occurring amino acid
  misc_feature (199)..(199): Xaa can be any naturally occurring amino acid
MLGAARRQLGSGPMLGQVLRRLRPAAAASTEAARGYSSAAKEITVRDALNSALDEEMSADPSVFLMGEEVGEYQGAYKITKGLLDKYGPDRVLDTPITEAGFTGIGVGAAYQGLRPVIEFMTFNFSMQAIDHIINSAAKSNYMSAGQINVPIVFRGPNGAAAGVGAQHSQCYAAWFAHVPGFKGLTPYSAEXARGLLKXAIRDQDPVVPWKMNTQW

SEQ ID NO: 28989 - protein, 356 aa, Cryptococcus neoformans var. neoformans B-3501A
MPRPPEDPDVRNSKTLAYILRHGAEKEGLYIRSDGFIKLADVLARPKLKGVDEPTILHLVQTNAKKRFELFWGYDPSPPRPKKKPTQGKTKKQLQRDRETAAAAAASAAVAASGTGEGQEKGKEPDAATIDIIASSLASTNLTAPSSSLSINSTAPAPAQSSTSVDPPELPLISLPDPHTSASDSDANAKASASANSDNPKGEYFIRATQGHSIQLESTAHLEQVKDDEEGKRKVGLMVHGTRWELWDTLKEQGLQKMTRQHIHLAPGFSGPITPRPNSTLYIYLDLSKLVAAGIPVYVSANGVVLTPGSKGGENGEGAGVGKEFWRRAVRRKEGKRWVVWEDGREVEREELSGEE

SEQ ID NO: 28990 - protein, 480 aa, Crocosphaera watsonii WH 8501
MTISFENLGLSDARVNKLQRLGFESPTEIQEKAIPLILESNDILGQSQTGTGKTAAYSLPILEQIDTKNPNVQTLILTPTRELAQQVAEALKDFSTERRLYILTVYGGQSIERQIRSLERGVQIVVGTPGRVIDLLERKKLVLDCLRWAVLDEADEMLSMGFIDDVKTILRKTPETRNTACFSATMPREIRDLVNQFLKSPVTVSVERKQAAPTHIDQHLYYVPRGWSKRKALQPILEMEDPESAIIFVRTKQTASELTTRLQEIGHSVDEYHGNLSQSQRERLVYRFRDGKIKLVVATDIAARGLDVENLSHVINYDLPDNSETYIHRIGRTGRAGKTGTAISLIEPVDRRMVRQIERKLRQKLETCKIPSRSQVEAKRIEKLQNEIKESLAGERMASFLPLVRELSDEYDPQAIAAAALQMIYDQDCPEWMKTDWEVPESAVPKPVIKRKGKYNPNNSKRHGNSNRGNRKKVIHPQTR

SEQ ID NO: 28991 - protein, 127 aa, Triticum aestivum
GPNVAQSQLVCTGCRNLLMYPAGATSVCCAVCSTVTAVPAPGTEMAQLVCGGCHTLLMYLRGATSVQCSCCHTVNLAMEANQVAHVNCGNCRMLLMYQYGARSVKCAVCNFVTSVGASPGAEQKPSS

SEQ ID NO: 28992 - protein, 584 aa, Prochlorococcus marinus subsp. marinus str. CCMP1375
MTLSSSPFGIGDSTKKEQNQILGADALMESLKNHGVDTIFGYPGGAILPIYDAVYKAEKAGWVKHILVRHEQGGAHAADGYARSTGKVGVCFGTSGPGATNLVTGIATAQMDSVPLVVITGQVPRPAIGTDAFQETDIFGITLPIVKHSWVVRDPSEIASVIAQAFFIASSGRPGPVLVDIPKDVGQELFDYQPVQPGSLIPAGFTPPQKPDPVAISKALDLIERAKKPLLYVGGGVISASAHDTLFAIAKRYHLPVTTTLMGKGAFDERESLSVGMLGMHGTAYANFAVTECDLLVAIGARFDDRVTGRLDSFAANAKVVHFEVDPAEINKNRVADVAVLGDLAISLSDLHELSKRRTVKPNTQEWLAQIEEWKIKYPLLIPSKEGEIYPQEVLIEIRDLAPDAYITTDVGQHQMWAAQYLRNSPRHWISSAGLGTMGFGVPAALGVQVALPKQQVICIAGDASILMNIQELGTISQYQLNTKIIIINNHWQGMVRQWQQSFYDERYSATNMLNGEPNFVALANAFGVGGVIIKERNSLKEKLKEALNSEGPMLIDVHVRRDENCYPMVPPGKSNAEMVGLPD

SEQ ID NO: 28993 - protein, 134 aa, Brassica napus
EKSMFNVDHSLFANEGRNKVRSAEDEIISNILSLDFDPWDESLTSPHNLAELLGKVDQRSSPVKPSNLLKQHNSQSRFSFAQESSNQAFDRENHSIYGQFSRERPIQESVVSRDIYRGNLGNLNGFASNYSGGL

SEQ ID NO: 28994 - protein, 401 aa, Cryptococcus neoformans var. neoformans B-3501A
MSTSTRRHVPDDKLANHKADPNAAANAGQVQERTTKGSSSSAPRKVRFNVGNNYHVVDVIGEGAYGVVASAVHRPSGTKVAIKKIAPFDHSMFALRTLRELKLLKYFAEEGVSENIISVLDIIKPPSYDTFKEVYLVQELLETDLHRVIRTQDLSDDHCQYFLYQTCRALKALHSAEIIHRDLKPSNLLLNANCDLKVCDFGLARSTQTAFPAEGNNQGFMTEYVATRWYRAPEVMLSFRMYTKSIDVWSVGCILAEMLSGKPLFPGKDYHNQLALILDVLGTPTIDEFHAITSKRSKDYIRSLPFRKKRTFESIYPSANPLAIDFLRKTLTFDPRKRYTVEQCLAHPYLDAYHDPEDEPSAKPLPPSFFEFDMMKDDISREELKRLLYEEIMGFRPVLEG

SEQ ID NO: 28995 - protein, 236 aa, Arabidopsis thaliana [sequence omitted]

SEQ ID NO: 28996 - protein, 174 aa, Triticum aestivum
MCCKRLSWVTPGFSQSRRCKRRPVIVIRLTIGRLGPTSHGPGRHGRGISVSRAEVRLFREFEVNDLARTGSIATQTVELKEGPLEQFSHEMEPFLRKQGLPVRLNKGVVELVADHVVCEEGKPLSPEAAHTLRVLGTKMATFRLYLVCRWSSDDFEVYKEGLAHLGGEEADESS

SEQ ID NO: 28997 - protein, 93 aa, Zea mays
MSVAKDDTGRTIPKFGEWDVNNPASADGFTVIFSKARDEKKAPTTKPQPGHITQRSASADSKDSRTDKMTSYNSRTNASKKWFCCVSPSPTQS

SEQ ID NO: 28998 - protein, 250 aa, Beta vulgaris subsp. vulgaris
  misc_feature (116)..(116): Xaa can be any naturally occurring amino acid
LHLFYQYNPNGVIWGPPVWGHSTSKDLVNWVPQPLTMEPEMAANINGSWSGSATILPGNKPAILFTGLDPKYEQVQVLAYPKDTSDPNLKEWFLAPQNPVMFPTPQNQINATSFRXPTTAWRLPDGVWRLLIGSKRGQRGLSLLFRSRDFVHWVQAKHPLYSDKLSGMWECPDFFPVYANGDQMGVDTSIIGSHVKHVLKNSLDITKHDIYTIGDYNIKKDAYTPDIGYMNDSSLRYDYGKYYATKTFFE

SEQ ID NO: 28999 - protein, 320 aa, Burkholderia xenovorans LB400
MSQHNADRIDVRLTQIRLEADDVASYEFRPIGTPVLPAFEAGAHIDLYLPENRVRSYSLVNAPHERHRYVIAVQREAAGRGGSAWMHRTPRVGDRFTIGAPMNDFPLCEAARQSVFICGGIGITPIVSMIRRLERTGASWQLHYAARERSRAAYADDLAQIDEAGSRITMHLESEGGRLDLRRVVERAPADAHLYCCGPRGMVDAFIEACASRPRAQVHFERFAAANESATAGGFDVVLGRDGRRIPVAPGKTILDTLLDHGVDVQYACSAGVCGTCRTGVIDGVPDHRDDYLTDEEKAGNRAVMVCCSGSLSPTLVLDL

SEQ ID NO: 29000 - protein, 375 aa, Mycobacterium avium subsp. paratuberculosis K-10
MESHRFDADVYARRLAAAASATAAAGLGGLVITPGYDLRYLVGSRAQTLERFTALVLPASGEPTVVVPRLEVASLKGSAIAELGLPVRDWVDGENPYELVAAALGGAPAATAVTDSMPALHLLPLAGVLGVLPVLATDVLRGLRMVKEECEVDALRKAGAAIDRVHARVPSFLIPGRTEADVAADIAEAIVAEGHSEVAFIIVGSGPHGADPHHGYSDRELQVGDIVVVDIGGSYEPGYHSDSTRTYSIGEPSPEVAQQYSILQRAQRAACDAVRPGVTAEQVAAAARDVLAAAGLAEYFVHRTGHGIGLSVHEEPYIVAGNDLPLAAGMAFSIEPGIYFPGRWGARIEDIVVVTDDGALAVNKRPHELIVVPVP

SEQ ID NO: 29001 - protein, 248 aa, Beta vulgaris subsp. vulgaris
LHFFYQYNPAGAVWGNIVWGHAVSKDLIRWKHLPIAMVADRWYDFNGVWTGSATILPDGQIMMLYTGSTNESVQVQNLAYPANLSDPLLLEWVKYPGNPVLVPPPGIGKLDFRDPTTAWLTSEGKWRITIGSKINKTGISLVYDTTDFKNYELLSNILHAVQGTGMWECVDFYPVSVAEPNGLDTSTNGPSVKHVLKASMDDDRNDYYTLGTYIEDNVTWVPDNPAIDVGIGLRYDYGRFYASKTFLK

SEQ ID NO: 29002 - protein, 746 aa, Ralstonia solanacearum
MNSKTDRPAEGAGATADRAAREAAVARALECLADHAGDHQTLTGEPLVSHARGTVAILEGLRVDAPSLQAAALFLLPILATDNEKAIEPAFGGEVARLVHDVRQLLRIGAIAGMASPAEAGVTRKNEAEARRAQVEALRKMLLAFAQDIRVVLIRLASRLQSLRWLAQNKLPAPEGMARETLDIYAPLANRLGIWQLKWELEDLGFRFEDPDTYKRIARLLDEKRIEREQFIGEAIARLQQTLRDAGIHAEVSGRPKHIYSIWRKMRGKDLDFADLYDVRAFRVIVDDIKDCYTVLGFVHHMWQPIPKEFDDYISRPKTNGYKSLHTVVIGDDGRALEVQIRTREMHHFAEYGVAAHWRYKEAGSKGYAGQFSASERYDEKIAWLRQLLAWKDDAEHTVAQEDSPWEQLKHTELDDHIYVLTPQARVIALPQGATPVDFAYYLHSDLGHRCRGARVDGTMVPLNTPLKNGQTVEIVTVKQGGPSRDWLNPELHYLASNRARAKVRAWFNALELEETLAQGRILIDKTLQREGKTAVNLEELAAKLGFKTPDELYAMVAKDEFSLRHVEAVLRTDGAPPAPADDEASITKKSRATSVARGAKSGVLVVGVDSLLTQMSRCCKPAPPDLIVGFVTRGRGVSIHRQNCATFQQLAARAPGRVIQTEWGNRGEAVYPVDIHVEALDRQGLLRDISEILSREKINVTGVRTLSSKGVAKMQFTAEVSEATQLQRALILIEEVTGVLSARRK

SEQ ID NO: 29003 - protein, 136 aa, Trifolium pratense
MASSVMASVSLKPTPFMVEKSSVRGLPNLSRPFRVVASGVKKIKTDTPYGTGGGMDLPNGLDASGRKQKGKGVYQFVDKYGANVDGYSPIYEPKDWSPTGDVYTGGTTGLAIWAVTLAGLLAGGALLVYNTSALSQ

SEQ ID NO: 29004 - protein, 130 aa, Brassica napus
MATIATSLNIATQRAVITSKSQPARLACPVRLNNPWKLGSRTNRLVSFRPVKSTPEGVISDKVEKSIKDAKESCADDPVSGECVAAWDEVEELSAAASHARDKKKAGGSDPLEEYCKDNPETDECRTYDN

SEQ ID NO: 29005 - protein, 250 aa, Beta vulgaris subsp. vulgaris
LHLFYQYNPYSAIWGNMTWGHSISNDLVNWVHLEHALNPIEPYELGGCFSGSITMLPGGRPVIFYTGADTNNFQSQNLAFPKDPSDPLLREWVKSPHNPVITAEDDIEPSDFRDPTTAWQAVDGTWQVLIGGKIDGRGMAYLYQSNDFINWTRSEKIFHSSVKTGMWECPDFYPVSINGKDGVDNYLEKGNTKFVLKASFLDHDHYILGYYKAETDGFQVEATDFMEANTDWRYDYGGKFYASKTFYERG

SEQ ID NO: 29006 - protein, 544 aa, Magnaporthe grisea 70-15
MTPQGLLAVCTGLLLLKIFISFVSRYRRHQILIRQHGCLPPPKAKLKDPIFGIDVILSNGRAAREHRSLQTFEERFYSIGATYSTKHGFPLIITMEPDNVRAVINQNFHDYALAPFRQPALKHFLGDGIFTTDGEKWHSSRALLRPNFNRDQIANLEAIETHVKDLFALLPRDGATPVDLKGLLLRFTMDSTTEFLFGQSVYSLRRNGARDGDSLEAQFETAFTGAQAECMEFIGMGPLARFARVNSQKQVEIVHRYIDKFVDRAIAFRKEYGKQGHRSESSLTGFVPGPAYSQPGYPCHAFRKEYEAGGGGPIGTGKEKPKYLFLQELAKQTTDRTRLRSELLNILMAGRDTTASLLGNLFFMISKSPEIMAKLQQEVDSLNGARPSYSSLRDMKYLKYCLRESLRLHPVAPVNTRIAVTDTVLPRGGGPDGSKPVLVPKGTAVGWSVYAMHRRKDLYGPDADRFRPERWETLNTRSEYLPFNGGPRICLGQQYALTEASYVTVRMLQEYEMESRDPGEWEEELAITACNRRGCLVALKARSE

SEQ ID NO: 29007 - protein, 165 aa, Ralstonia solanacearum
MMIPVTDLCDAHEDQLASGAVRVLAPVFRSFGARAAFAGPAATLKVFEDNGLVRAMLEQPGEGRVLVVDGGGSLRCALVGGNLAKLAEDNGWEGVLVNGCVRDTRELAACNVGVHALAAHPRKSFKKNQGERDIGVQMPGAYIHPGEWIYGDEDGVLVSRERLHD

SEQ ID NO: 29008 - protein, 488 aa, Treponema denticola ATCC 35405
MSKAINQNTDKAPEDASLFQERKRTFVSDIERGVYDIKDSIDYKYSTGLGLNEEVVKKISARKKEPDWMLDLRLKSLAYFNERPMPDWGADISDLDIQEIIHYIVSDTKPLAETWDDVPEEIKKTFDRLGIPEAERSSLAGVGAQYDSEVVYHSLKEDLEKQGVVYLDMETAVHKYEDIVKKHFMQLIKPNDHKFAALHGAVWSGGSFVYVPKGVRVELPLQSYFRLNAQQSGQFEHTLIIVEEGAYLHFIEGCSAPKYYKNALHAGAVELYVGKKATLRYSTIENWSRNLYNLNTKRAIVEEDGAIEWVSGSFGSRVTMLYPMSILKGDRSRSEFTGVTFASEGQCLDTGTKTVHIGKNTVSEMRSRSIAKNGGEANYRGLLYIGANATGAKAAAECESLMLDDKSRSDTIPIIESHIDDVDIGHEAKIGRISESMVFYLMQRGLDEAAAKSLIIKGFVEPISKELPLEYAVELNNLITIELEGTIG

SEQ ID NO: 29009 - protein, 975 aa, Burkholderia vietnamiensis G4
MKHEHPDRLMNRTPLSLAALETHDAFAERHIGPDAASQQAMLDTLGFASRAALIDAVIPASIRRAEALPLGPFAQPKSEAEALAALRALADKNQVFRSYIGQGYYDSHTPAVILRNVLENPAWYTAYTPYQPEISQGRLEALLNFQQMVVDLTGLAISNASLLDEATAAAEAMTLLQRTGKPKSNVFYVADDVLPQTLEVVRTRALPIGIEVKTGPAAEAAQAGAFGVLLQYPGVNGDVRDYRALTDAIHAAGGHVVVAADLLALTVLTPPGEWGADVAVGNTQRFGVPMGFGGPHAAYMAVRDEFKRQMPGRLVGVTVDAQGKPALRLALQTREQHIRREKATSNVCTAQALLAIMASMYAVYHGPHGLKTIALRVNRIAALLAAGVKQLGFTTVNDTFFDTLTIDAGARTAQLHAFANAKRINLRRVSDTQVGVSVDETTTRDDLADLLAVFAQAAGGTAPDVDALDAGLPGVAALPAGLERTSAYLTHHVFNRHHSETEMLRYLRSLSDKDLALDRSMIPLGSCTMKLNATSEMLPVTWPEFGRIHPFAPSEQTAGYREMIDQLEQMLVAATGYAAVSLQPNAGSQGEYAGLLVIHAYHASRGEAHRDVCLIPASAHGTNPASAHMAGMKVVVVACDAQGNVDIADLKAKAEQHANDLAAIMITYPSTHGVFEQNVREICEIVHAHGGQVYVDGANMNAMVGLTAPGQFGGDVSHLNLHKTFCIPHGGGGPGVGPVAVGPHLAKFLPNQRSTGYARGEEGIGAVSAAPYGSASILPISWMYIAMMGAKNLTAATETAILNANYIAKRLAPHYPVLYSGPGGLVAHECILDLRPIKETSGITVDDVAKRLMDYGFHAPTMSFPVPGTLMVEPTESESQEELDRFIAAMIAIREEIRAVEEGRADREDNPLRHAPHTAAVVTANEWPHAYSREQAAYPVASLVTNKYWPPVGRADNAYGDRNLFCSCVPMSEYA

SEQ ID NO: 29010 - protein, 228 aa, Staphylococcus aureus subsp. aureus MRSA252
MPKLILCRHGQSEWNAKNLFTGWEDVNLSEQGINEATRAGEKVRENNIDIDVAFTSLLTRALDTTHYILTESKQQWIPVYKSWRLNERHYGGLQGLNKDDARKEFGEEQVHIWRRSYDVKPPAETEEQREAYLADRRYNHLDKRMMPYSESLKDTLVRVIPFWTDHISQYLLDGQTVLVSAHGNSIRALIKYLEDVSDEDIINYEIKTGAPLVYELTDDLEVIDKYYL

SEQ ID NO: 29011 - protein, 242 aa, Ipomoea batatas
SAPPCVAEVKVESYVFPATAKPPGTAKTLILGGAGARGLNIDGKFVKFTAIGVYLEADAVPSLAVKWNGKSAEELTDSVQFFRDIVTGPFEKLTRITMILPLSGKQYSEKVSENCVAFWKAAGIYGDAESKAIEKFNDVFSDQMFPPGASIFFTQSPLGWLTISFSKEGSMPEIASAVIENKPLSEAVLESIIGSKGVSPEAKQSLAVRLSELFKNGVSGGDAITGKVGCENDVIPQTVVSK

SEQ ID NO: 29012 - protein, 336 aa, Frateuria sp. ANA-18
MAKQIHSLTITDVVAQGSDAILLSLGVEAGQQQSFCFRPGQYLTLAVSVQEDELWRCYSITSEPVQGQPISVLVRRVAEGRVSNWLCDHAQPGQQIKVLPPAGRFILARPGQPVLLYAGGSGIAPVFALAREALAQGASRVLLFYANRDRATAMLLKELEAMRLRATGRLEIVYWYDSEQGLPSQDVLAAQTRGLEQADAYLCGPEPFMRAVNTSLQAARFESQRMHQEDFGGVVENEAGEEDEPVGDPAQLTVQIKGKTYTVQVKAGEALLTAMLRAGLPAPHACRVGECASCMCRLQEGEVQRLESSVLDDDDVADGWLLACRRAASSTLKVRF

SEQ ID NO: 29013 - protein, 967 aa, Cryptococcus neoformans var. neoformans JEC21
MAEDNHNEPPPPNIPTPTFPQSKTINTAFARSPTTDSEIEPADEEEGDHRPFNPRTSTTDEHQTLFYQDASHFNVEHHVGRVCRSFAPLALLAIIALAFIPVASATDLDPYTSCPALPQKNTPILSTTGYVFNHVVRFIGLDDSFVGQHLANVKRNLDNTSIIEACMVPVLVLLSGMFAGLTLGYFSVDQTQLQVLAISGTPKHQEYARLIMPVRKNSHLLLTTLILGNMIVNEALPVVMDGLLSGVVSVVVSTAMVVIFAEIIPQSICSRYGLLIGARMAWPVRIMIWIAYPIAWPIAKLLEWVLGAHHGIIYRRGELRELIKMHAAGGEGGGDLDFDTVQITQGALDLARKTVKDSMTAIEQVFMLPIEAKLDYETLGHVVRSGHSRIPVYQMVEVPDIDLSAPTLGPTKTKMVKKVLGSLLVKSCVLLDPEDATPLASIPINAIPSIPFDEPLTNMLNVFQEGRSHMAIVSRRVRRVGPVDPEDAQSAMTAAAGGLRQRFFRRVAGISGNRSFSDGDSSASGEEDLEKGEGGKKKKRRRKNAEKHDRAGSCSSDNHTIVRPISSDDDGFTEADEIKRMAKEQQEAEMKQQRGKDSKKGSLVQAAKLTQLEQSVPADAQLSNDAVENFFDGLEGAPLGIITLEDVLEELIGEEIYDEYDEHGVPRSAASAFVPLEAMLAARKAALARQELAIAQSTPIPPVSDADVEQVVAAPTPGAGRRVKAKIQIPKFSLKKPVSQPGRPRTERLAANETPAATPPADPPCYTNKPDEKSTYSAQIITIPGELDEPPLACAQSDSRLVNRRLSTPLDSGATATPSPQPQYSLSVPGPASAVPTRLLPAGGTVSTPAVIPTSHQPSLLNEAIFIGRERKRMAASHPGQVRSQSSGPTVSSKQPTPPISVYDFGIQAAGVNGERVEGQEIVSPRPIAAQQKKIPKFKSVPTPVATPSFGFDPSAESKSSSREEKE

SEQ ID NO: 29014 - protein, 122 aa, Arabidopsis thaliana
  misc_feature (34)..(34): Xaa can be any naturally occurring amino acid
ETNLVGGRKWPCWFWAGRMVAGPITWNAALSCGXVNSTWAACMGYGLQGGVIPPAGGSGVKNLTSLAKTTPDRKQACNCIQGAVGALGFGLNAGRAVGIPKAWGVNIPYKISTEPNCKTGGG

SEQ ID NO: 29015 - protein, 582 aa, Magnetospirillum magnetotacticum MS-1
MCGLAALFSYRADAPPPDAAELARMTGAMTRRGPDGEGVWSGAEGRVRLGHRRLSIIELGEPGAQPMIADDGKTAIVFNGEIYNYRALRLRLEQQGVRLRSHSDTEVILEGYRLLGPDILAQLRGMFALAIWDGERGGILAARDGLGIKPLYVADDGRTVRLASQVKALLAGGGIETAPDPAGHAGFFLWGHVPEPHTLYRSIRALKPGTWERWGLDGRRDSGAFFDLGAELRRPRQAPRADLKSALEDSVAHHLVADVPVGVFLSAGRDSTTLAAMAAKLGTGKVKSVTLAFEEFAGTPKDEAPLAELAARHYATEHITRRIPGGDFAACRDQILADMDQPTIDGVNVWFVARAARESGLKVALSGLGGDELFAGYDNFTTIPRIVSVLGPSGAIPGLGRGFRALAGHFVRPKLAGLLELGTTLPDAYLLRRGLFMPWELPQVMDADMARIGLEALAPRLHLKRAAAGLGDDVAAISALEMQFYMRNQLLRDADWAGMAHSLEIRVPLVDTHLLDAVLDLRAAGRTPGKADMAACADPGLPTAILERPKTGFFVPVAQWLGESSLRGWAKRVHAALCEETL

SEQ ID NO: 29016 - protein, 526 aa, Candida maltosa
MTSDSTIHELIQSYITKWYVIVPLAIIIYKVFDYFYVLSLRKRLGAAVPTNEETDGYFGFHLPFVLMSKKKDGTIIDFSIERYPELKHPETPTFEFPIFTVKLISTIDPENIKAILATQFSDFSLGTRHAHFAPLIGDGIFTLDGAGWKHSRAMLRPQFAREQVGHVKLLEPHVQVLFKHIRKNKGREFDLQELFFRFTVDSATEFLFGESVESLRDASIGMTSKSKDVDGIEDFTGAFNYSQNYLASRSIMQQFYWILNGKKFRECNAIVHKFADHYVQKALNLTEADLEKQAGYVFLYELVKQTRDPQVLRDQLLNILVAGRDTTAGLLSFVFFELARNPDVVAKLKDEIDTKFGLGEDARIEEITFESLKQCEYLKAVLNECLRLYPSVPQNFRVATKNTTLPRGGGKDGLSPILVRKGQTVMYSVYATHRMESVYGKDATTFRPERWFEPETRKLGWAFVPFNGGPRICLGQQFALTEASYVTVRLLQEFSTLTLDPNLEYPPKKMSHLTMSLFDGTNVQMY

SEQ ID NO: 29017 - protein, 420 aa, Methylococcus capsulatus str. Bath
MAARNAFYAQSGGVTAVINASACGVLETARQYPDRIGTVYAGRNGIVGALTEDLIDTGQESAEAIAALRHTPSGAFGSCRYKLKGLEENRAQYERLIEVFRAHDIGYFFYNGGGDSADTCLKVSQLSEKLGYPLQAVHIPKTVDNDLPITDCCPGFGSVAKYIAVSVREASFDVRSMAATSTCIFVLEVMGRHAGWIAAAGGLASDERHELALVILFPEQVFDPERFLRAVDEKVRSHGYCSVVVSEGIRGADGRFVAESGSRDVFGHARLGGVAPVIADLIKERLGYKYHWAVADYLQRAARHIASRTDVEQAYAVGKAGVEMALKGLSAVMPAIVRTSDSPYRWEITAASLAEVANVEKKMPLEFISADGFGITEACRRYLRPLIEGEDYPPYAGGLPDYVTLCNVAVPKKLAASFSV

SEQ ID NO: 29018 - protein, 538 aa, Candida maltosa
MPVSFVHNVLEVVTPYVEYYQENLTKWYILIPTILLTLNFLSILHTKYLEYKFNAKPLTNFAQDYSFGVITPLMLMYFKWHGTVMEFACNVWNNKFLVLNGNVRTVGLRIMGLNIIETTDPENVKAILATQFNDFSLGTRHDFLYSLLGDGIFTLDGAGWKHSRAMLRPQFAREQVAHVKLLEPHVQVLFKHVRKSQGKTFDIQELFFRLTVDSSTEFLFGGSVESLRDASIGMTPSTKNIAGREEFADAFNYSQTYNAYRFLLQQFYWILNGSKFNKSIKTVHKFADFYVQKALSLTEADLEKQEGYVFLYELAKQTRDPKVLRDQLLNILVAGRDTTAGLLSFLFFELSRNPTVFEKLKEEIHNRFGAKEDARVEEITFESLKLCEYLKACVNEALRVYPSVPHNFRVATRNTTLPRGGGKDGMSPIAIKKGQNVMYTILATHRDPNIYGEDANVFRPERWFEPETRKLGWAYVPFNGGPRICLGQQFALTEASYVTVRLLQEFHTLTQDADTRYPPRLQNSLTLSLCDGANIQMY

SEQ ID NO: 29019 - protein, 544 aa, Methylococcus capsulatus str. Bath
MAVEIRKTTPYPDQKPGTSGLRKKVKVFLQGNYLENFVQSVFDTVETADGATLVVGGDGRYFNRQAIQIILRMAAANGVGRVLVGRGGLLSTPAASCVIRKHRALGGFVLSASHNPGGPEEDFGIKFNVANGGPAPESFTDRVYQRSRVIDAYRIVSAPDLDIDTPGRSRIGDMEIEVIDPVADYAELMEHLFDFGLIRSGFRSGALTLRFDAMHAVTGPYAKRILEETLSAAPGSVVNAVPLEDFGGGHPDPNLVHARELAAVMYSGRPPTLGAASDGDGDRNMIMGANCFVTPSDSLAILAANAHLVPGYKDGLRGVARSMPTGRAVDRVAAAMGIECYETPTGWKFFGNLLDARRITLCGEESFGTGSDHVREKDGLWAVLFWLNLIALRKQSVAAIVADHWRRFGRDYYSRHDYEGIEVPVAEGIMGRLQDLLAELPGRAFGDYRVTLADDFRYVDPVDGSVSEHQGIRIAFDNSSRIVFRLSGTGTEGATLRVYMERYERDPNLHNLPTQEALADLIAIAEDLCQVKKRTGMAQPSVMT

SEQ ID NO: 29020 - protein, 175 aa, Capsicum chinense
MEGESTLVMVAVSESTINGYPHASISSKGAFEWTLNKIVRSNTSGFKLLFLHVQVPDEDGFEDMDSIFASPEDFKGMKNRDKIRGLHLLECFVNRCHEIGVPCEAWTKKGDPKEIICHEVKRVQPDLLVVGCRGLGPFQRVFVGTVSEFCVKHAECPVVTIKRSAAETPQDPIDD

SEQ ID NO: 29021 - protein, 405 aa, Magnetococcus sp. MC-1
MKSGKVLIAQGGGPTAVINQSLVGAVLEAQRYAQVDRIYGAVHGVRGIVDENFMDLSMETAGNLERVAAMPSSALGSTRDKPDRAYCAEMFKVLKAHDIRSFFYCGGNDSSDTVRIVKEFADEANYEFTAMHIPKTIDNDLMANDHTPGFPSAAKFVACAFAGVNMDNRALPGVYVGVVMGRHAGFLTGAAAMARVFADDGPHLIYVPERTFDMNTFLADVKSTYDKYGRCIVAVSEGVHDAEGTPIVTKLQENVERDAHGNVQLSGTGALADLLCDEIKAKLGIKRVRGDTFGYLQRSFLGIVSEVDAREAREVGQKAVQEALRHNASGTITIKRVGNYASAYELANVKEVAALTKVMADNFITTASNDVTADFIHYLRPLLGSNPLEHAARLMAPMVEKILHK

SEQ ID NO: 29022 - protein, 537 aa, delta proteobacterium MLMS-1
MADLQEYFNDFNKLPAFSRLTELALQPVELRAAVDPARIADYRCRGGGVELIYFGQRVNGQVLEALGELAAQAGVLEQYDLMRQGAVLNQIAGYASENRQVLHCSNRDIFAESPRQPEATARTANELAKLREFLEDLEAGRLANPAGEPFETMLQVGIGGSDLGPRALYLALRAYAKPGRQVRFISNVDPDDAAAVLQELDLSRTLVKVVSKSGTTLETLANEELVRRAYQDAGLDPKDFFIAVTGQGSPMDNPEHYLRSFYMFDYIGGRYSATSMVGLVMLGFALGYEQVLEILRGAYEMDEAATQPDPTRNPPLLLALLGIWNRNFLGSQDVAILPYSQALSRFAAHLQQLDMESNGKGVSRAGEPLGWDSGPVVWGEPGTNGQHAFYQLLHQGTAVVPIEFIGFKESQYRRDLTVKGTTAQEKLLANLLAQSLALAVGQEEENPNRRFPGNRPSSILLADRLTPATMGALLALYEAKVVFQGFLWNINSFDQEGVQLGKRLADGLLAQYEARRRGTTPPQDPLGRALLALASSE

SEQ ID NO: 29023 - protein, 140 aa, Xanthobacter autotrophicus Py2
MRFLHTMVRVTDIDQSLDFYCNKLGLKEVRRKEVPQGRYTLVFLAAPGQADVAEIELTYNWDPEPYGEGRNFGHLAFEVEDIYATCERLMAGGVTINRPPRDGYMAFVRSPDNVSVELLQKGGPKAPAEPWASMANTGKW

SEQ ID NO: 29024 - protein, 546 aa, Methylococcus capsulatus str. Bath
MPQSTDLPAWRTLSEHFKTIAPRHMRDMFADDPGRFEAFSVRLGDLLFDYSKNRITRETVATLIQLAEEAGLREKIDAMFRGERLNVTENRAVLHVALRNRSNRPIRVDGKDVMPEVNRVLDRMRRFSQSVRTGEWRGATGKAITDVVNIGIGGSDLGPKMVVKALQPYADPRLRAHFVSNVDESDLVEILRPLNPETTLFVVASKTFTTQETMTNGRSARAWFLERISDESAIARHFVAISTNRNKVAEFGIDPRNMFEFWDWVGGRYSLWSAIGLPIALSVGMDRFEELLEGAHFVDEHFRTAPFERNIPVLMGLLGIWYINFFGAQSHAVLPYDQYLEDLPAHLQQADMESNGKTVDVEGRPVNYSTGPVIFGQPGTNGQHAFYQLLHQGSMLVPCDFLAAAESHHPLAEHHDILISNFLAQTEALMRGRTTDEARQEIASEELPPERLEALAAAKTFPGNKPTNSFLYRRLDPHTLGMLIALYEHKIFTQGVIWYINSFDQMGVELGKQLAKTILAELPGDAPVASHDASTNGLIRYFKSLR

SEQ ID NO: 29025 - protein, 208 aa, Triticum aestivum
  misc_feature (103)..(103): Xaa can be any naturally occurring amino acid
  misc_feature (150)..(150): Xaa can be any naturally occurring amino acid
MTSVWKTKVLPGLNKIFDKDGKKAAAAEFLKSFNKEEIDKEIEDKKTELEPKVVETIEASPPEIKGLMKDKKTSKIKKNSVAVTKFLDDLAKIDFPGAKLVSXAVPKSGTTPLSPAIVFILDKVAPFVPAPKEEPKAEPEDAAPAEETTXREVAVEEKKEEAEPSAAPAEAPAPVEAAAPAAEVVEEKKEEEKPAEAAAPAAEEPEKK

SEQ ID NO: 29026 - protein, 653 aa, Medicago truncatula
MSFFATLNLLVVLVMLLILPYNNVHGDEQQDSCSTRCGDHNISHPFRLKDSPENCGDKRYILSCEDNNQLILYYGSFGKYYVQSINYNNFTIRLLDFNSHGYSNYSLPPHPLGFYSFDSRTINPIALPYRVFGDHYIDLFKSMLYVTCPKHVQYSSGIYFDAACMNISNSYEQQKGNYIVFGDKSLLELALGDECRIELMFLTSWDFKHGGNNNISCTDIHRMMFYGFELSWLNSLCKHGWYSDILDYNNQRRAPSETWSLQALVTVSILMYIGILLGFLSGVKFVLGVPIVLLIYKWRQKHLSVYDGIEDFLRSDNSIMPIRYSYKDIKKITEQFKIKLGNGGYGTVFKGKLRSDRLVAVKLLDKAKTNGQDFVNEVTTIGRIHHVNVVQLIGFCVEGSKRALIYEFMPNGSLEKYIFSLIEESNSLSCKKLYAISLGVARGIAYLHNGCNMKILHFDIKPHNILLDENFNPKVSDFGLARVSPTDKSIVSLTAARGTIGYMAPELFYRNVGTISHKADVYSFGMLLMEMASRRKNLNPLAEQSCQIYFPFWIYGQLHDGSEVTIENDTDEEMKLAKKMMIVALWCIQTKPGDRPSMDKVIEMLEEEDGDLQMPNKPYLYPQDLPAEDFRDGNTRSSWSSSDTSINDFMEPT

SEQ ID NO: 29027 - protein, 645 aa, Medicago truncatula
MPSLTLVVVLLILIFSYNVDGDVEHQESCSRRCGVHSISHPFRLKDSPEKCGDKRYILSCEDNNQLILYYEFEEYHGKYYVQSINYNNFTIRLLDFNLASSNNSIPSYYSLGLYNFSSNFFTSPYLAYHRYKNYTNHMLTKSMLYVSCPNRMEYSYIGNCMNRTSYSQDVNSFYVGGYGKSLLEFGLGDGCHIEFMYLTWDVEDDGNINNISCTDIRRRMYYGFELSWLNSRCKHGRYAVLDQYNQPHCKYDYWNNAAWIVARLSFGLGVLVGLLSGVKFVLGLPFIIVLLIKKWRKKHQSMYDGVEDFLSSDNSIIPIRYSYKEIKKITGNFMTKLGNGGYGSVFKGQLRSGRLVAVKLLDSAKSNDRDFVNEVATIGRIHHVNVVQLIGFCVEGSKRVLIYEFMPNGSLEKYIFSHTEENYSLSCEQLYSISLGVARGIEYLHNGCNMKILHFDIKPHNILLDENFNPKVSDFGLARLCPTDKSIVSLTAARGTIGYMAPELFYRNVGTISYKADVYSFGMLLMEMANRRKNLDVLAGQSSQVYFPFWVYDQLQDGREITIENATNHEMKLAKKMMIVALWCIQAKPSDRPPMDKVLEMLEEEDEDLQMPNQPDLDAQDVRDDRTGSSLYSSGTLVTDSKEPI

SEQ ID NO: 29028 - protein, 293 aa, Medicago truncatula
MSQRITEEPLPTKTAQSTVTCLYQTSIGGQWRNISVLWCKNLINHTLNLKVDSARGEQFHQNCKIEVKPWCFWNRKGYRSFDVDGNQIDVYWDLRSAKFAGNCPEPCSDYYVMLVSDEEVVLLLGDYKKKAYKRMKMRQALVEATLLVKRENVFAKKSFSTKAKFDEKRKESDIVVESSTAGNKDPEMWISIDGIVLIHIKNLQWKFRGNQTVMVNKQPVHVFWDVYDWLFSVSGSGPGLFIFKPGPTEVESDKEEKGLEGESDDGSATSGYYSTKSYTPFESCLVLCAYKLE

SEQ ID NO: 29029 - protein, 346 aa, Medicago truncatula
MYDGVEDFLSSDNSIIPIRYSYRDIKKITEQFKTKLGNGGYGSVFKGQLRSGRLVAVKLLDKAKSSDQDFVNEVATIGRIHHVNVVQLIGFCVEGSKRVLIYEFMPNGSLEKYIFSHTKENYSLSCEQLYSISLGVARGIEYLHHGCNMKILHFDIKPHNILLDENFNPKVSDFGLARLCPTDKSIVSLTAARGTIGYMAPELFYRNVGTISYKADVYSFGMLLMEMASRRKNLNALAEQSSQIYFPFWIYDKFHDGSEVTIENDTDQEMKLAKKMMIVALWCIQTKPDDRPSMDKVLEMLEEEDGDLQIPNKPYFCPQDSPIADVYSSNSWTSDGTSVSGSKGPN

SEQ ID NO: 29030 - protein, 474 aa, Bacillus cereus E33L
MKKHLYINGDWKSVNTYKPLYAPYSEETLAEIAQGTEEDVKEAVAAAKNAMKEMNTLSAYDRATILEKVAQKMDERREEFAEIIAKEAAKPIRAARGEVDRTVQTYKFAAEEAKRIYGETLPLDAAPGADGRIAYTIRKPIGVIGAITPFNFPLNLVAHKVGPAIAAGNTVVLKPADQTPLSSYALIELFEEAGLPKGALNIISGPGSTVGEAIVTNDDVASITFTGSPKVGIGIKAKAGLKRVTLELGSNAAVIIDEDVELTDELIERVKWGAFVNNGQVCISVQRVFVHEERMNEFLSKLRKAMETVVVGDPLIEETDVSALISKKDVERIDNWVQEAVKEGANVLYGGNKRDERVFEPTVLTNVPEHVSVQCQEVFGPLMTVNTFKEFNEAIEQVNNSRYGLQAGVFTNNLFKAMRAIDELEVGGVMINDIPTFRVDHMPYGGVKESGTGREGIKYAIEEMTEMKLVCIKK

SEQ ID NO: 29031 - protein, 327 aa, Prochlorococcus marinus subsp. pastoris str. CCMP1986
MASTLLFTALKEAIDEEMANDVNVCIMGEDVGQYGGSYKVTKDLYEKYGELRVLDTPIAENSFTGMAVGAAMTGLRPIVEGMNMGFLLLAFNQISNNMGMLRYTSGGNYKIPAVVRGPGGVGRQLGAEHSQRLEAYFHAVPGIKIVACSTPTNAKGLMKAAIRDNNPVLFFEHVLLYNLSEELPEGDYICSLDQADLVKEGKDITILTYSRMRHHCLKAVEELDKKNIDVELIDLISLKPFDMKTISKSIKKTNNVIIVEECMKTGGIGAELIALITEECFDDLDTRPIRLSSQDIPTPYNGNLENLTIIQPHQIVEKVEEVINGSI

SEQ ID NO: 29032 - protein, 293 aa, Treponema denticola ATCC 35405
MSAKIIDGARIAADLRADIAKDVEKIKAKGVQPTLAVILVGNDPASQSYVKGKTNALHEVGMNDRTFRLPETTTQDELLKLIKELNADKLINGILVQLPLPKQIDPDAVIEAINPEKDVDGFHPVNVGKLLLGHDTFIPCTPHGVIHLLKRTGVETKGAKVVIVGRSNIVGKPLSVLMMNKDVNATVTVCHSGTKNLTEVTKEADILVAAMGKPRFIKADMIKKGAVVIDVGVNRIDDSTKKSGFRLVGDVDFEPACEIASAITPVPKGVGPMTIAMLVANTLIAAKRQNGLE

SEQ ID NO: 29033 - protein, 334 aa, Medicago truncatula
MLGQGAYGTVYKGSISKEFSVAVKILNVSQGNGQDFLNEVGTMSRIHHVNIVRLVGFCADGFKRALIYEYLPNGSLQKFINSPDNKKNFLGWKKLHEIALGIAKGIEYLHQGCDQRILHFDIKPQNVLLDHNFIPKISDFGLAKLCSRDQSIVSMTAARGTLGYIAPEVFSRNFGNVSYKSDVYSYGMMLLETIGGRKITEDLEENSSHVYYPEWIYNLIDDEEEMKIHIDDEGDEKIARKMAIVGLWCIQWHAMDRPSMQMVVQMLEENIDKTPIPPNPFDSQSRQPRRTDATATTRQVNSHRSPAYTFQLHNPKYTNGTKFCNTIYCSNNSL

SEQ ID NO: 29034 - protein, 648 aa, Medicago truncatula
MSSLTFVVLLLILIFSYNKVYGDEHQDSCSRWCGVHNIRSPFRLKDSPKECGDERYNLSCEDNNQLILYHDSFGKYYVQSINYNNFTIRLLDFNLASSNNFIPPYYSLGLYNFSSNSIVSPYLAFRYYKNNTLNVLTKSMLYMSCPNRMEYSYIGNCMNRTSNSQDVNSFYVGSYGKSLSEFGLGDGCRIQFMYLTSLDVEDDGADHNNNNISCADIRREMFYGFELSWLNSFCKLDVSYAYAELDQNNQAHCNYAYWNNVAWIVACLSSRTVALVVFLSGVKFVLGAPLIIALVIYKWRRKHLSMYDGIEDFLRSDNSIMPIRYSYKDIKRITEQFKTKLGNGGYGSVFKGQLRSGRLVAVKLLDRAKSNDRDFVNEVATIGRIHHVNVVQLIGFCVEGSKRVLIYEFMPNGSLEKYIFSHNEENYSLSCEQLYSISLGVARGIEYLHNGCDMKILHFDIKPHNILLDENFNPKVSDFGLARLCPTDKSIVTLTAARGTIGYMAPELFYRNVGTISYKADVYSFGMLLMEMANRRKNLNALADQSSQIYFPFWVYDQLQDGREMTILNDTNHEMKLAKKMMIVALWCIQAKPSDRPPMDKVLEMLEEEDEDLQMPNKPDYYVQDEDTRDDRTGSSWYSSGTSVTDTK

SEQ ID NO: 29035 - protein, 115 aa, Triticum aestivum
  misc_feature (14)..(14): Xaa can be any naturally occurring amino acid
MARARSTHLVLVAXVVAMLLVTTDADISWCHVTSDLSPCISYDRGNGAYPTADCCNGVRSLAGAGRSTADNQAACKCIKSAAGGLKAGKDGGIPSKCGVSVPYAIRASVDCSKIR

SEQ ID NO: 29036 - protein, 481 aa, Bacillus licheniformis ATCC 14580
MSKASFRDYALSGDITKALDHLGYKEPTAVQSEVIPAVLKKRDVVVKSRTGSGKTAAFGIPLCELTEWEENKPQALVLTPTRELAAQVKEDLTNIGRYKRIKAAAVYGKSSFERQKTELKQKCHIVVGPPGRVLDHIEKGTLPLEKLKYLVIDEADEMLNMGFIDQVGAIIRHLPEERLTMLFSATFPEDVEHLSLQYMKDPLKIEIKAGGTTTADIEHQLIIVNENDPFSLLVDLFIVENPDSCIVFCRTQEQVNELQWRLSVLGYPCEKIHGGMPQEDRFAVMNRFRRGAFRYLIATDVAARGIDIENITHVINYELPLDQESYVHRTGRTGRAGSRGKAITLASAREKRMIADIEDYIGFHIPIIEEPSKEEIARAKAAFQKKINRKPELKQDKSESLNKEIMRLYFNGGKKKKLRAVDFVGTIAKIDGVSAEDIGIITIQEQGSFVEILNGKGPLVLDAMKNTTVKGKLLKVHKARK

SEQ ID NO: 29037 - protein, 609 aa, Haloarcula marismortui ATCC 43049
MAEDSIAVVDLERCQPDRCNYECMNYCPPNRSGKECIVKREDEYEEDEPFEGQPDQVRISEEICLGESCGICVNKCPFDAIEIINLPQELTDEPVHRYGENAFALYGLPSPAEGQVTGILGPNGIGKTTAVRILADEMQPNLGRYGEEPSWDEILDEYRGTALQEYLEQMRGGDVDVARKPQYVDRIPNQFDGKAIELLDQTDERGALDYLVEQTGIEPVVDNHIDDLSGGELQRVALVATLARDADFYFLDEITPYLDIGQRMTAARLIRELAEEEDRSMLVVEHDLAILDLLADNINVAYGTPGAFGVITPPKSTKKGINEYLSGYLENENMRIRQTDIEFEEHAPRSASQGDVVIEYPELQKSYGDGEFSLDVEAGTIRESEVLGVVGPNGIGKSTFAKMLAGRLEPTAGEIDTSLDIAYKPQYIEIDQPMRVDAFLASITDDFGSSYWNTEIAQPLQLESVMEQQLTDLSGGERQRVAIAACLSKDADLYLLDEPSAHLDVEQRVMATSAIRRYAENHDATAMVIDHDIYMIDLLADRLLVFDGEPAKNGHAAPPQGMREGMNEFLQNLDITFRRDERTSRPRINKPDSQLDREQKNAGEYYYAP

SEQ ID NO: 29038 - protein, 486 aa, Mycobacterium sp. KMS
MINANLIINGREETSDRTIDVVSPADIRVLLGSVPDAAPGQVDEAVAAAAMAFPEWSSRPLEERQGALLAAAGTIHDMIEEYAPILSRENGKILEESHVDLEFASGICGYTAGISAEILADQQIRDTGGTTLIRRRPIGPVAAITPWNFPVVLAFMKLAPALVAGNTVVLKPAANSPLVLAEVIRALQQHFPPGVLNMVTGGDAVGEALVAHPRIRKIGFTGGIDTGRKVMAAAARDIKRVTLELGGNDPAILLDDVDLSPETMRQIVKGAFGTTGQVCFGLKRIYVPTRIHDRFVEAFSAAVDEIVVGPGDDPRVTMGPLNNAQQKNLVEKIVDDARSSGATVTTLGQRLDSAAWDHGHFMMPSVVTEADPRLAIVEEEQFGPVVPVLKYDELDDVIRLVNQSQYGLAASIWTSDEERAFLLGRRFDTGSVFINSHTFTSLDPRAPFGGAKASGLGREFSPASLDSYTELQTISRRIGPPGPPLS

SEQ ID NO: 29039 - protein, 480 aa, Neisseria meningitidis MC58
MKQLAMYINGRFENDFNGEWRDVLNPSTEEAIAREPKGGKADVDRAVAAARAAQPAWERLPAVERGAYLRKIAQGIRERADELTDTIVAEGGKTKDLARVEVMFTADYLDYQAEWARRYEGEIIQSDRPRENILLFKRPLGVIAGILPWNFPFFLIARKMGPALVTGNTIVVKPSSVTPINCHIFAEIVDAVGLPAGVFNVVNGPGAEIGNALSAHPQVDMVSLTGSVEAGRQVMEAASANITKVSLELGGKAPAIVLKDADLDLAVKSILASRVGNTGQICNCAERVYVHSSLKDAFIEKMTAAMKGVRYGNPAEAEAGALEMGPLIEERAVKAVAEKVERAVKQGAKLVCGGKRAEGRGYFFEPTLLTDTDNSMDIMKEETFGPVLPVSAFDTLDQVIALANDCEFGLTSSVYTTNLNEAFYVTRRLQFGETYINRENFEAMQGFHAGWKKSGIGGADGKHGLEEYLQTQVVYLETDI

SEQ ID NO: 29040 - protein, 545 aa, Yarrowia lipolytica CLIB122
MSLQRALQYLWDAEPHNTDHVTPLFCLGQVYDADTSLKEVNDDTEEDGIVVPLDTSNDTSWPPDFLADVQSRIWLSYRTGFPLIPKSDGSGTIHLGKLKNMIRGGGFDPRGYTSDVGWGCMIRTSQSLLANALLFRHLGRGWRWNKGDDFVYLSEGNTESRGGESRNGGANKEQETAVSEETAVSEETIISWFLDSPDSPFSIHKFVRHGEKACSTPAGDWFGPSAAGSSIYALCNEFPDSGLKVYYNGNGGGDVYEDELLETGFPLLVLCGLRLGIDNVNPIYWDSLRQMLSLPQSVGIAGGRPFTSHYFFGFQGEQLFYLDPHQPKPAVKTTDKDTTSFHSSRIWKLHLKEMDPSMLVGFYITSEADWETFKGSLTASKEKTSSQIVHIHPSRHNIPSFDEEDEYVSIGGASDDDFVDVTKRARKVAAMTGNTGSGRSSPSILDSHLVTETRDIIESVPPRKRVDNDLTSAPVDVPKPVQKRSQSHGDWEKVEEPEEEMVEVESMKGMQDNGCSAEYGSLVDRDAEADDSTLSTETTDRDWVV

SEQ ID NO: 29041 - protein, 324 aa, Robiginitalea biformata HTCC2501
MHKIAVLTSGGDSPGMNAAIRSVVRTCAYMNVECMAIYRGYQGMIEGDFVAMNARSVNNIINKGGTILKSARCEDFKTPEGRKKAHEQLVQAGISGFVVIGGDGSFTGATIFNKEYDFPVIGIPGTIDNDIFGTRYTLGFDTALNTVVDAIDKIRDTASSHNRLFFVEVMGRDVGHIALNAGVAAGAEEILIPEENLGLDRLLESLRRSKKTGKSSSIVVVAEGDKTGKNVFELKEYVEEHLPIYDVRVSVLGHMQRGGPPSAFDRVLASRMGVKAVEALIAGKTNLMVGIIDNEIVLTPIAEAIKGHTKIDRELVRVSDIMTI

SEQ ID NO: 29042 - protein, 348 aa, Gibberella zeae PH-1
MPSAYPKSILPPSLVAVTGANGFIAQHCIALLLSKGYRVVGTVRSATKAEQVFDLHHKNPNLSVRVVEDITSTASYLSAFGPTGPDAILHLAAPFNYDATDLEDELMIPAVKGSTAILTAARQLGSVKRIVHTNSFAGIYDASKGLQPGKIYTAKDWSPLTYEDGVTAPNAAVAYRASKTVAEQVAWKWMNDNPSAQFDLVSLNPAMVFGPWLEGAIPGSPKQLNTSNKIVYGIISAGEEGPIPPTRGPVWVSVEDVALAHLRAIQVPEAGGERYLLAAGVYCNQEIADIARKIAGKYKNKIPRGSPGLREATTHFGVDASETQKGLGIEWQSLESSTNIKPLITQVP

SEQ ID NO: 29043 - protein, 970 aa, Zea mays
MASTKAPGPGEKHHSIDAQLRQLVPGKVSEDDKLIEYDALLVDRFLNILQDLHGPSLREFVQECYEVSADYEGKGDTTKLGELGAKLTGLAPADAILVASSILHMLNLANLAEEVQIAHRRRNSKLKKGGFADEGSATTESDIEETLKRLVSEVGKSPEEVFEALKNQTVDLVFTAHPTQSARRSLLQKNARIRNCLTQLNAKDITDDDKQELDEALQREIQAAFRTDEIRRAQPTPQDEMRYGMSYIHETVWKGVPKFLRRVDTALKNIGINERLPYNVSLIRFSSWMGGDRDGNPRVTPEVTRDVCLLARMMAANLYIDQIEELMFELSMWRCNDELRVRAEELHSSSGSKVTKYYIEFWKQIPPNEPYRVILGHVRDKLYNTRERARHLLASGVSEISAESSFTSIEEFLEPLELCYKSLCDCGDKAIADGSLLDLLRQVFTFGLSLVKLDIRQESERHTDVIDAITTHLGIGSYREWPEDKRQEWLLSELRGKRPLLPPDLPQTDEIADVIGAFHVLAELPPDSFGPYIISMATAPSDVLAVELLQRECGVRQPLPVVPLFERLADLQSAPASVERLFSVDWYMDRIKGKQQVMVGYSDSGKDAGRLSAAWQLYRAQEEMAQVAKRYGVKLTLFHGRGGTVGRGGGPTHLAILSQPPDTINGSIRVTVQGEVIEFCFGEEHLCFQTLQRFTAATLEHGMHPPVSPKPEWRKLMDEMAVVATEEYRSVVVKEARFVEYFRSATPETEYGRMNIGSRPAKRRPGGGITTLRAIPWIFSWTQTRFHLPVWLGVGAAFKFAIDKDVRNFQVLKEMYNEWPFFRVTLDLLEMVFAKGDPGIAGLYDELLVAEELKPFGKQLRDKYVETQQLLLQIAGHKDILEGDPFLKQGLVLRNPYITTLNVFQAYTLKRIRDPNFKVTPQPPLSKEFADENKPAGLVKLNPASEYPPGLEDTLILTMKGIAAGMQNTG

SEQ ID NO: 29044 - protein, 316 aa, Photobacterium sp. SKA34
MSNVKHCELLILGSGPAGYTAAVYAARANLNPVMITGMQQGGQLTTTTEVENWPGDAEDLTGPALMDRMKAHAEKFNTEIITDYIVETDFSQRPFLLKGESNTYTCNALIISTGASAKYIGLESEEAFKGRGVSACATCDGFFYRNQKVAVVGGGNTAVEEALYLSNIASEVHLIHRRDSFRSEKILIDRLMDKVANGNIILHTDRTLDEVLGDDMGVTGLRLKDTHSNATEELEVMGVFIAIGHQPNTAIFEGQLDMENGYIKVQSGLNGNATQTSIEGIFAAGDVMDHNYRQAITSAGTGCMAALDAERYLDAQ

SEQ ID NO: 29045 - protein, 369 aa, Triticum aestivum
MLGAARRSGCVLGQLMQTLRPAATAARSYSATPKEMTVREALNSALDEEMSADPSVFLMGEEVGEYQGAYKITKGLLDKYGPDRVLDTPITEAGFTGIGVGAAYQGLRPVVEFMTFNFSMQAIDHIINSAAKSNYMSAGQISVPIVFRGPNGAAAGVGAQHSQCYAAWYAHVPGLKVLTPYSAEDARGLLKAAIRDPDPVVFLENELLYGESFPIKAEVLDSSFSVPIGKAKIEREGKDVTITAFSKMVGYALQAAEILSKEGISAEVINLRSIRPLDRAAINASVRKTNRLVTVEEGFPQHGVGAEICMSVVEDSFEYLDAPVERIAGADVPMPYAANLERLAVPQVEDIVRAAKRACYRSSSMAANA

SEQ ID NO: 29046 - protein, 165 aa, Aegilops tauschii
VMASSATTVAPFQGLKSTAGLPVSRRSSGSLGSVSNGGRIRCMQVWPIEGIKKFETLSYLPPLSTEALLKQVDYLIRSKWVPCLEFSKVGIVFREHNSSPGYYDGRYWTMWKLPMFGCTDATQVLNEVEEVKKEYPDAYVRVIGFDNLRQVQCVSFIAFRPPGCE

SEQ ID NO: 29047 - protein, 84 aa, Triticum aestivum
VTFALSPCISYARGNGANPPGACCKGVRSLAGAARSTVDKQTGCKCIKSAVGGLNVGKAPGILSKWGVRVPYAISSFVDCFKIR

SEQ ID NO: 29048 - protein, 473 aa, Methylococcus capsulatus str. Bath
MPSPDRGPQELRRVLGWTSAGAIMAGSVIGTAIFLVPSTIVRELDSVGWTFFVWVLGGLLSLGGALSYAELGAAFPEAGGEYAFLRRAYGPLWGFLFGWQQVVIGKTGSIATIATGFALFLGFFVDGLQREWLHLSWGEVGWGVTGLQFVAMTAVASFSLINCFGVGRGGAVQSFLTVLKVAAIVALAVLVLGAGGGSWDHFRQAPEHPAWTGWGAFAAALAAVLWAYDGWNNLTLVGSEIRDPDRTIPRVFLLGLLGVMGVYLLANLAYFYALPPEALKRSERVAQDVAQLVFGDFGGAAITAAAVVSTLAALNGSILSGARVSYAMARDGLFFSPLARLHPVHRTPVNALIVQASFASFLILLFGQDRAGFDRLFNYAVFGLWAFYGITALAVIVLRRTSPEVVRPYRVAGYPWVPLIFFAVAGLFCLGMIFQNPSETAIGLVFLLLGIPFYLYWCSGGKAEAHRKSSPGE

SEQ ID NO: 29049 - protein, 791 aa, Magnetococcus sp. MC-1
MRFGLSTRFIFFISVLLTVAFVASGVLIMQLEKRFMASQFSQRADALGNFVAKIAPESILSFDVVQLEHFAEMLMGQPDLILAAIVDRSGAPLAIHLNESLPRPLHFKFRGSLFESATFKNLIAFYKNHPQAIYFSYPIRHQYNLLGEVLIILDSSSQREVQHKIFLQRIIVAIGVILLVVLSLYLGFKRYILSPILDLVEGANRMAHGNYKEPIPRTTKAELDTLTVAVNHMMLSIRTNTEEYAKIFRAVEQSPASVVITDAQGNIEYVNPKFCQLTGYSAQEVLGKNPRLLKSGEMSPNFYRDLWHTVTTGLEWHGEFYNRAQNGSLFWEAASISAIRSEQGKITHFVAVKDDITARKKLERELQQARDRAESSNRAKSEFLALMSHEIRTPMNAILGMSELLAESNLSGEQRELLTVQRRAALALLDLINDILDLSRVESGRLELDHAPMHLPDFFIEIQDLFRQQAIKKNLAFSITLEDDLPKTYFADRARLRQVMINLVGNAIKFTQQGGVWISVERLSQQGEMVKLKFSVVDSGCGIPSEAQSQIFEPFTQADAYVTRHHGGTGLGLTISQRLVQLFGGTLQVESTPNQGSRFSFILILQVTTEERSTQPNTQAQTTPEPNTAPSSGAPNARILLAEDMPDNALLIKRFLKNYPCELTLVTDGRQAVEQFCRTTAHFDLVLMDMQMPVLDGYSAVREIREYEAIHDLAPTPILALTAHALKNDAEKSLAAGCDEHLTKPIRKEVLLAAISRHLSLAKHDKPQQHVINDILPAPSRMPQEPDPSAL

SEQ ID NO: 29050 - protein, 337 aa, Magnaporthe grisea 70-15
MSLVAAKKSLVALLCRSEGPNNNDNNTNSSSPSTLSPFSSAATAGEQEPLLGGGRRRPAEDDDLESQTSSHTLGSTDSQASTASSSSRRISARIISDATIGLSDGLTVPFALTAGLSALDDTRIVIYGGLAELIAGAISMGLGGYLGAKSEIASYQETLSQTTHMINTDPEATLEAVRAVFAPYDVPKPTVDALAAHISTAPDSKLLPDFLMHFHHREPEPESSRALVSGLTIALGYFLGGLLPLLPYVIVSGPEDLHRAWSISVAVMAVALFSFGYAKTCFVTGWAGQRCVRKGLVGAVQMVVVGGAAAAAAMMLVKLFNPMAEAGGGGPLTGAAA

SEQ ID NO: 29051 - protein, 336 aa, Anabaena variabilis
MIRVAINGFGRIGRNFARCWLGRENSNIELVAVNDTSDPRTNAHLLNYDSSLGVKKVDITADDNSITVNGKTIKCVSDRNPENLPWKEWEIDLIIESTGVFTSKEGALKHVNVGAKKVLITAPGKNEDGTFVIGVNHHDYDHNVHHIISNASCTTNCLAPIAKVLNDKFGIIKGSMTTTHSYTGDQRLLDASHRDLRRARAAAINIVPTSTGAAKRVALVIPELKGKLNGVALRVPTPNVSMVDFVVQVEKRTITEEVNQALKDASEGPLKGILDYSELQLVSSDYQGTDASSIVDASLTLVMGNDLVKVMAWYDNEWGYSQRVLDLAELVAEKWV

SEQ ID NO: 29052 - protein, 150 aa, Brassica napus
VDPRVRCQAMNEVDVFSIQNERELYPVGWIHTHPSQGCFMSSVDLHTHYSYQVVMCCFFMGLRRFSSQFLSCPFQVMVPEAFAIVVAPTDSSRSYGIFKLTDPGGMEILRGCSETGFHPHKEPEDGNPVYEQCSNVYKNSNLRFEIFDLR

SEQ ID NO: 29053 - protein, 112 aa, Silicibacter sp. TM1040
MKLIIAAIKPFKLEEVREALTKLGVSGLMVTEIKGFGAQAGHTEIYRGAEYEVNFVPKVKLEIVVPSDLADQVVETITQASRTGKIGDGKIFVLDVAQAVRVRTGETNQDAL

SEQ ID NO: 29054 - protein, 165 aa, Triticum timopheevii subsp. armeniacum
VMASSATTVAPFQGLKSTAGLPVSRRSSGSLGSVSNGGRIRCMQVWPIEGIKKFETLSYLPPLSTEALLKQVDYLIRSKWVPCLEFSKVGFVFREHNSSPGYYDGRYWTMWKLPMFGCTDATQVLNEVEEVKKEYPDAYVRVIGFDNLRQVQCVSFIAFRPPGCE

SEQ ID NO: 29055 - protein, 547 aa, Magnetococcus sp. MC-1
MSSLTQLPQWQALQTHLEENRSVQMRDLFDQDSQRFSRFSLQQGELLFDYSKNRITAETMARLLDLARAQDVEGWRDRMFAGEAINETEGRAVLHVALRNRSGRPIRVAGEDVMPAINQVLQQMRQFSEAVRSGAWKGQSGQAITDVVNIGIGGSDLGPVMVCEALKPYHQPGLSVHFVSNVDGTHMAETLKGLNAETTLFIVASKTFTTQETLTNAHTARDWLVAQLGEAAVRKHFVALSTNAEAVSAFGIDTDNMFAFWNWVGGRYSLWSAIGLPIAIAVGFEGFMALHDGAYAMDEHFRTAPLASNMPVIKALIGIWNHNFLGAESFAVLPYDQYLHRLAAYLQQADMESNGKYVTRDGARVDYTTGPVLFGEPGTNGQHSFYQLIHQSTRLVPADFIAAAHTHNPVGDHHAKLLSNFFAQTEALMTGKTAAQVRQELEAAGLHGAALEALVPHKVFDGNRPTNSILVRQFTPYTLGQLIALYEHTIHVQGMVWGINPYDQWGVELGKQLAKKILPELTTPGEVHSHDGSTNGLINHYKAWLAE

SEQ ID NO: 29056 - protein, 165 aa, Triticum turgidum subsp. dicoccoides
VMASSATTVAPFQGLKSTAGLPVGRRSSGSLSSVSNGGRIRCMQVWPIEGIKKFETLSYLPPLSTEALLKQVDYLIRSKWVPCLEFSKVGFVFREHNSSPGYYDGRYWTMWKLPMFGCTDATQVLNEVEEVKKEYPDAYVRVIGFDNLRQVQCVSFIAYRPPGCE

SEQ ID NO: 29057 - protein, 616 aa, Medicago truncatula
MNTYYHVMGLLLLVCYLNTLVVEFAHGTTDLVNYPQDLTCGNQVIKFPFHIKNQNPNPSLHGYPDFELFCSSNNETMIELPYKVKLNVKNIDYKHQTIELFDPQSCLYKHIHNLNLSESHFNYLKHDYDDFVDHHFFNCSLLNRDWMDSYSVSCLRTSTSQIYAIPSSTNIEDLPLSFCTKMFNVSFKPSDSLRLTWSEPNCKHCESKGKICGWKNTTSNSDNKEVDCVPKNKKGSSKALVNTGSILGSLFFILLIGGVFHIYDSYILRKEKQAIIEKFLEDYRALKPTRYSYVEIKRITNNFGDMLGQGAYGTVYKGSISKEFSVAVKILNVSQGNGQDFLNEVGTMGRIHHVNIVRLIGFCADGFKRALIYEFLPNGSLQKFINSPDNKKNFLGWKKLHEIALGIAKGIEYLHQGCDQRILHFDIKPQNVLLDHNFIPKICDFGLAKLCSRDQSIVSMTAARGTLGYIAPEVFSRNFGNVSFKSDVYSYGMMLLETIGGKKITEDLEENSSHVYYPEWIYNLIDDEEEMRIHVDDEGDEKIARKMAIVGLWCIQWHAMDRPSMQMVVQMLEGDEDKTPIPPNPFASQSRRPRKNSAIATTGHLAQDLDVIHELD

SEQ ID NO: 29058 - protein, 339 aa, Hordeum vulgare subsp. vulgare
MENILHATPAPVSLPESFVFASDKVPPATKAVVSLPIIDLSCGRDEVRRSILEAGKELGFFQVVNHGVSKQVMRDMEGMCEQFFHLPAADKASLYSEERHKPNRLFSGATYDTGGEKYWRDCLRLACPFPVDDSINEWPDTPKGLRDVIEKFTSQTRDVGKELLRLLCEGMGIRADYFEGDLSGGNVILNINHYPSCPNPDKALGQPPHCDRNLITLLLPGAVNGLEVSYKGDWIKVDPAPNAFVVNFGQQLEVVTNGLLKSIEHRAMTNSALARTSVATFIMPTQECLIGPAKEFLSKENPPCYRTTMFRDFMRIYNVVKLGSSLNLTTNLKNVQKEI

SEQ ID NO: 29059 - protein, 219 aa, Malus x domestica
MDGCSNYYVDPPGESSSASDTSRPMFLTLSDKEVLLASTCPKKRAGRKKFRETRHPVFRGVRRRNSGKWVCEVREPNKKTRIWLGTFPTAEMAARAHDVAAIALRGRSACLNFADSARRLPVPASSNAKDIQTAATEAAEAFRPTEESDEVCGSPVAAPSESTSASEQQQVFYMDEEAVFGMPGLLADMAEGMLLPPPHYSDDDDVDVCADVPLWSFSI

SEQ ID NO: 29060 - protein, 314 aa, Zea mays
MACYNTASLAATLLAFALTFQACLAGRRLTALVQEPAITMRYHKGALLSGPIAVNFIWYGDFSAPQRAAITDFVSSLTAAAPAAAQPEPSVATWFKTARKYYASSKVPFPALRLGSHAVDRNCSLGRRLTERDLLRLAARGAPSRAINLVLTAADVAVDGFCESRCGTHGASPRSRSGRFAYAWVGNPASQCPGQCAWPFHQPVYGPQAAPLTPPNGDVGVDGMVISLASMLVGTVTNPFGNGFYYQEGSADAPLEAATACAGVYGKGAYPGYAGSLLVDQASGASFNANGAHGRKYLVPALVDLDTSSCATLV

SEQ ID NO: 29061 - protein, 564 aa, Yarrowia lipolytica CLIB122
MCGIFAAYKLPDVAEYKTHALQLSKRIRHRGPDWSGNCSKNNTIICHERLAIVGLDTGAQPITSPDESIVLGVNGEIYNHRILRKEFPDYKFKTHSDCEPIIPLYEKYGIDAPKKLDGMFAFVLYDSNKDRIIAARDPIGITTLYMGRSYKNPQTVWFASELKCLVDDCDEIKAFPPGHVYDSDTDKITRYFEPSWWDGSKIPTKRVDYKELREALEAAVRKRLMSEVPYGVLLSGGLDSSLIASIAARETRRAAPEKTVNQDLAGVDEQGHLTNSSGSRLHSFSVGLPGAPDLLAAQKCAEFIGTIHHEYTFTVQEGLDALRDVIYHLETFDVTTIRASTPMYLLSRKIKAGGVKMVLSGEGSDEVFGGYLYFGAAPSPEAFHTECVQRVKNLHYADCLRANKSTMAWGLEARVPFLDKQFLEVAMNIDPKDKIIDKDHIEKYSIRKAFDTSDEPGAEPYLPDEILWRQKEQFSDGVGYSWIDGLKDAAENTITDEQLKNPKPHWGADVPKTKEAYWYRCMFDELFPQPAAATTVMRWIPKADWGCAEDPSGRYVKSHSAHKQ

SEQ ID NO: 29062 - protein, 146 aa, Lotus japonicus
MGFTAQQDALVGSSYEAFKQNLPSNSVLFYTLILEKAPAAKDMFSFLKASGPTHSPQLQAHAEKVFGLTRDAAAQLLAKGEVTLADAGLGAVHVQKAVADPHFAVVKEALLKTVQAAVGDKWSEDLSTAWGVAYDGLAAAIKKAMS

SEQ ID NO: 29063 - protein, 339 aa, Synechococcus elongatus PCC 6301
MTIRVAINGFGRIGRNFLRCWFGRQNTDLEVVAINNTSDARTAAHLLEYDSVLGRFNADISYDENSITVNGKTMKIVCDRNPLNLPWKEWDIDLVIESTGVFVTAEGASKHIQAGAKKVPITAPGKGEGVGTYVIGVNDSEYRHEDFAVISNASCTTNCLAPVAKVLHDNFGIIKGTMTTTHSYTLDQRILDASHRDLRRARAAAVNIVPTTTGAAKAVALVIPELKGKLNGIALRVPTPNVSVVDLVVQVEKPTITEQVNEVLQKASQTTMKGIIKYSDLPLVSSDFRGTDESSIVDSSLTLVMDGDLVKVIAWYDNEWGYSQRVVDLAELAARKWAA

SEQ ID NO: 29064 - protein, 440 aa, Silicibacter sp. TM1040
MKKLTVTLAATALATLPGLAFAQEAAAETPDINPYIFTTLLFLIGGFLVFWMAAGFAMLEAGLVRSKNVTMQLTKNVALFSIAAIMYWLVGFNLMYPGDGWIIPGVMGPLFATTSLEPVGLGADAAALDYASVGSDFFFQLMFCATTASIVSGTLAERIKLWPFLIFVAILTGVIYPIEASWVWGEGFLDGLGFSDFAGSTLVHAAGGFAALAGALILGPRIGKYKDGRTIPMPGSNLALATLGTFILWLGWFGFNGGSQLAMGTVGDVTDVSRIFANTNMAAAAGAVTALILTQLLFKKPDLTMILNGALAGLVSITAGPLDPTLFGALLIGAVGGVIVVFTVPMLDKMKIDDVVGAIPVHLLAGLWGTFAVPFYTEGTSFITQIVGFATIGIFTFVVSGVVWMILKATMGIRVSEEDEINGLDMAELGMEAYPEFKGS

SEQ ID NO: 29065 - protein, 229 aa, Saccharophagus degradans 2-40
MTDQKVIMIRHAQSEWNAKGLFTGWADPVLTPLGRKEAAEAASNLAKLGLKFDRIYTSVLQRATETASIIAKSLNCQVPLTKSWQLNERHYGVLQGKSKEALAKQVGAEQVWRWRRGFEDMPPPMPLASPMHARFDTKYDGVEPTSLPSVESLKHTQIRAVNYWQKEVLPSIRNNSSVLVAAHGNTLRALIMYLANMSVQEVEGFEIPTGIPIELNINKHGRCSSWRYI

SEQ ID NO: 29066 - protein, 210 aa, Brassica napus
  misc_feature (198)..(198): Xaa can be any naturally occurring amino acid
STHASALSSLSRVCHCDGLLLCTTEAYSWLAVWNPFTSQTRWICVEPISIRHRKIWYSHALGYEKGKSCRVYKILRFAGNVHEVYTLKSSDSWRALDVSPDWDIGYDNHGVSFQGNTYWYAKVAGGVGFLLCFDFTGERFGQLLPLAFECFSEDSVILSSVGGEQQQLAGLFQHRETVEMEVWVTTKVEPDAVSWSNXLAVDMGPLTGFR

SEQ ID NO: 29067 - protein, 964 aa, Leptospira interrogans serovar Lai str. 56601
MNSTLQNQTKTNLEKVGTDPLDTFPRRHIGPNLQQTAEMLKELGLSSVEELIDKAVPVGIRLKKSLDLPKASTEHKILQNLKGIASQNQVFRSYIGAGYHSCIIPGVIQRNILENPGWYTAYTPYQAEISQGRLEALLNFQTMIIDLTGLEISNASLLDEGTAAAEAMFLAYSVRKNETAKKFFVSELCHPQTIDVVVTRANPLGIEVQIGNHESIELNEDFFGVLLQYPATDGKVIDYTSFIQRSHNVGAISTVAADLLALTLLKSPGEMGADIAVGSSQRFGLPLGFGGPHAGYFATKDEFKRSMPGRLIGVSKDSQGNSGLRLSLQTREQHIRRDKATSNICTAQVLLAVISSMYAIYHGPEGLKNIATRIYKFTSIFANVLKNAGFSITNEFFFDTITIQAGAKVQEILNRAYSKKINFREYKDGKIGITLDETVNLEDLKDLLEIFEIKNTDIEKLFVDVSNVPDSFKRKTSYLTHPVFQSHHTETKMLRYIRKLESRDLSLTTSMIPLGSCTMKLNATTEMYPVTWPEFGAIHPFAPADQTKGYKIIFEQLEKWLCEITGFAGVSLQPNAGSQGEYAGLLAIRRYHESRNESYRNVCLIPISAHGTNPASAAMAGFQVVVVSCDPNGNVDLEDLKAKAEEHKKDLAALMITYPSTHGVFEESVKEICQIVHSCGGQVYMDGANMNAQVGLTSPGEIGADVCHLNLHKTFCIPHGGGGPGVGPIGVAKHLVPFLPGHVLVNNATGNEHGAVSAAPWGSASIVLISWVYIALMGSEGLTNATRNSILNANYIAKRLEKVYPVLYKGKNGFVAHECILDLRPFKKSAGIEVEDVAKRLIDYGFHAPTMSFPVPGTLMIEPTESESLEELDRFCEAMLLIYQEILDVQNGTLDKTDNPLKNSPHTAAMVTSDRWDHLYPRERAAYPASWLKDHKFWPYVGRVDNVYGDRNLVCSCLPIESYQ

SEQ ID NO: 29068 - protein, 360 aa, Thermoplasma acidophilum
MDVERVFEYAREVDTLLIYNASESARDPTFTYVTQTTNGIFEGSALIVGKNGTTIVTSQLEEQAARATGLDVRIFKNSTDFQNILRELLRDVNTVGLNYQSLSLSSYKMLLRIVPDKEFLDVSASILEARKIKQAEELKKIREAAKIGSEVLPDVLDSLKEGMTEYEVASKIVYLMMKNGASGPSFDTIVAFGQNAAMPHYSPGQAKLKRGDFVLMDYGARYMGYCSDITRTVVFGKATEEQKEMYNTVKEAQAAGMKAIREGANGKDVDAAARNIIDSTKYKGRFIHSLGHGVGLEVHDHPALSPTMDFPLKANMVVTVEPGIYVPGYGGVRIEDDVVVTKEGYEKITSAPTYELIEVS

SEQ ID NO: 29069 - protein, 400 aa, Lycopersicon esculentum
RILGLGDLGCQGMGIPVGKLALYTALGGVRPSACLPITIDVGTNNEKLLNDEFYIGLRQRRATGQEYYDFLHEFMSAVKQNYGEKILVQFEDFANHNAFELLAKYRNSHLVFNDDIQGTASVVLAGLIASLKLLGGALCDHTFLFLGAGERGTGIAELIALEISNKTNIPVEETRKKIWLVDSKGLIVSGRKETLQAFKKPWAHEHEPVNNLLDAVKAVKPTVLIGTSGTGRTFTKEVVEAMACMNKRPLIMALSNPTSQAECTAEEAYSWSEGRAVFASGSPFPSFEYDGKLNIPGQANNCYIFPGFGFGLVMSGTIRVDDDMLLAASEALAAQVTEEHYAKGMIYPPFADIRKISAHIAASVARKAYELGVATSLPRPADLVKYAESCMYTPNYRSYR

SEQ ID NO: 29070 - protein, 165 aa, Triticum aestivum
VMASSATTVAPFQGLKSTAGLPVSRRSSASLGSVSNGGRIRCMQVWPIEGIKKFETLSYLPPLSTEALLKQVDYLIRSKWVPCLEFSKVGFVFREHNSSPGYYDGRYWTMWKLPMFGCTDATQVLNEVEEVKKEYPDAYVRVIGFDNLRQVQCVSFIAFRPPGCE

SEQ ID NO: 29071 - protein, 406 aa, Arabidopsis thaliana
MAAFLQTNIRLEIIPGRYSSLTDHKFRAPYRIRCAAASPVKKRYNITLLPGDGIGPEVISVAKNVLQKAGFLQGLEFDFQEMPFGGAALDLVGVPLPEETSTAAKQSDAILLGAIGGYKWDKNEKHLRPEMGLLNIRRDLNVFANLRPATVLPQLVDASTLKKEVAQGVDMMIVRELTGGIYFGEPRGITINENGEEVGFNTEIYAAHEIDRIARVAFETARKRRGKLCSVDKANVLDASILWRKRVTALASEYPDVELSHMYVDNAAMQLVRDPKQFDTIVTNNIFGDILSDEASMITGSIGMLPSASLGESGPGLFEPIHGSAPDIAGQDKANPLATILSAAMLLKYGLGEEKAAKMIEDAVVDALNKGFRTGDIYSPGNVCKLVGCKEMGEEVLKSVDSKVPV

SEQ ID NO: 29072 - protein, 568 aa, Triticum turgidum
MASWFETYHHPSKPPRERETAAFFGCRLGIRENNCELTCASCRSFLPPVKILIRSIRLGCCCSWVRGSCACCCSWIRGLCGRKKREAGKETSTPETKKTKRKWRRNFCGWTSHEAEEPLTSETKKKREAGQEASTSETKKTKRKWGRSFCGWTSHEAEEPLTSETKKKRKNGASSSEPDKKRWFKNKIWRKKKAKNKQLATLVKEISLPNSPKARAAAGEILRIGNHNIPSRVFAYSQLSDATNSFSQENLLGEGGFGRVYKGYISETMEVIAVKQLDKDGLQGNREFLVEVLMLSLLHHPHLVTLLGYCTECDQKILVYEYMPLGSLQDHLLDLTPKSQPLSWNTRMKIAVDAARGLEYLHEVANPPVVYRDLKASNILLDGNFSAKLADFGLAKLGPVGDKTHVTTRVMGTYGYCAPEYAMSGKLTKMSDIYCFGVVLLELITGRRAIDTTKPTREQILVHWAAPLFKDKKKFTKMADPKLDSKYPLKGLYQALAISSMCLQEEASSRPLISDVVTALTFLADPNYDPPDDIEPLPITVPDFDRGISLSEPEEVKEKFEGKQVEDS

SEQ ID NO: 29073 - protein, 165 aa, Secale cereale
VMASSATSVAPFQGLKSTAGLPVSRRSSGSLGSVSNGGRIRCMQVWPIEGIKKFETLSYLPPLSTEALLKQVDYLIRSKWVPCLEFSKVGFVFREHNSSPGYYDGRYWTMWKLPMFGCTDATQVLNEVEEVKKEYPDAYVRVIGFDNLRQVQCVSFIAFRPPGCV

SEQ ID NO: 29074 - protein, 116 aa, Rhizobium etli
MGNQMKIVMAIIKPFKLDEVREALTAIGIQGLTVTEVKGYGRQKGHTEIYRGTVYAVSFLPKLKIEIAVASELVDRAVEAIGASAKTGQIGDGKIFVYSIDHAVRIRTGETDSEAL

SEQ ID NO: 29075 - protein, 542 aa, Leuconostoc mesenteroides subsp. mesenteroides ATCC 8293
MTTTGYSILRNPFLNKGTAFSAAEREQLGLTGTLPSQVQMIEEQAEQAYKQFQAKSPLLEKRTFLMNLFNENVTLFYHLMDQHVSEFMPIVYDPIVAESIEQYNEIYTNPQNAAFLSIDHPENIESSLKSVADGRDIKLVVVTDAEGILGMGDWGVNGVDIAVGKLMVYTAAAGIDPATVLPVSIDAGTNNKILLENPLYLGNKHERIAGEKYLEFIDKFVTAEQKLFPASLLHWEDFGRSNAQVILDKYKDSIATFNDDIQGTGMIVLAGIFGALNISKEKLVDQRFLTFGAGTAGMGIVNQIFSELKQAGLSDAEARSHFYLVDKQGLLFDDTEDLTEAQKAFTRSRKELVNSEQLDNLEAVVNEIRPTVLIGTSTQPGTFTEAIVKSMAQNTERPIIFPLSNPTKLAEATAENLIKWTDGKALIATGIPAANVTYKGVTYKIGQGNNALIYPGLGFGLVASTAKLLTQETISAAIHALGGLVDADEPGAAVLPPVSNLTEFSQKIAEITAQSVLKQGLNREKIADPKQAVQDAKWSAEY

SEQ ID NO: 29076 - protein, 423 aa, Caulobacter crescentus CB15
MTASLRTLKNGVRVVCDPMPGLETLALSVVAGRGAAYEDPARSGWSHLLEHMVFKGAGSRSARDIVEVIENQGGSINAATGYERTSFQVRALKGGLDLGMDVIADLVRRPTLDPADLTREKQVVAQEIAEAADAPDDYVFDLIQRASWGDHPVGRPILGSDETVNAASVEALSDWRGDLYAADRLVIAATGAVEEAELMAAAERAFGDLPATPGVGLAQSAAFVGGPQAEARKLEQAHLVFMLPACGAREDDYFALRIFAECLGGGMSSRLFQEAREKRGLAYNIDAYADTYADHGALGIYAGCAASDAVETAKVCADELIKLADRIEEAELARAKAQLKAHMFMAREQPLSRAEQGAGQVLLFDRLYPPAELAREVDAVTPQDVARLGQRLLAAGRAATAVLGAKSALKAGEVFDKALFSAA

SEQ ID NO: 29077 - protein, 236 aa, Haemophilus somnus 2336
MSKLSLIQQLKQQKLSVGILSANWLQLNEEVTTLLEKQINVLHFDIADGQFSSLFTVGAIGIKYFPTHCFKDVHLMVRNQLEVAKAVVANGANLVTLQLEQYHDFALTIEWLAKQKTTYANQVYPVLIGACLCPETPISELEPYLDQIDVIQLLTLDPRNGTKYPSELILDRVIQVEKRLGNRRVEKLINIDGSMTLELAKYFKQGTHQIDWIVSGSALFSGELKTNLKVWKSSIM

SEQ ID NO: 29078 - protein, 432 aa, Exiguobacterium sibiricum 255-15
MGLFEFKLPDIGEGIHEGEIVKWFVKAGDTVKEDDILLEVQNDKAVVEIPSPVDGTVKEVKVDEGIVAVVGDVLITFDVEGEGSAPSEEEAPEQPKAADNAKDVQDTDKKVEDKPNEVQIHKSERVIAMPSVRKYAREKGVDIREVQGSGDNGRVVKEDIDAFANGGQSSTAPAAEEKAPAAQASASKSEVKPYVAAQPELETREKIKGIRKAISKAMVNSKHTAPHVTLMDEVDVTNLVALRKNFKEVAAAQGTKLTYLPFVVKALTAAAKKYPAINASIDDVNEEVVYKNYFNIGIAADTDNGLVVPVVKDADRKSIFGLADNINDLAGKARDGKLSGDEMKGGSITITNIGSAGGQWFTPVINHPEVAILGIGRIAEKAVVKNGEIVAAPVLALSFSFDHRLIDGATAQNALNLVKRLLNDPQLLIMEG

SEQ ID NO: 29079 - protein, 146 aa, Lotus japonicus
MGFTAQQDALVGSSYEAFKQNLPSNSVLFYTLILEKAPAAKDMFSFLKASGPTHSPQLQAHAEKVFGLTRDAAAQLLAKGEVTLADASLGAVHVQKAVADPHFAVVKEALLKTVQAAVGDKWSEELSTAWGVAYDGLAAAIKKAMS

SEQ ID NO: 29080 - protein, 161 aa, Shewanella sp. MR-4
MTSTIYSHSANDIQGNPTALAQYQGKVILIVNTASECGFTPQYKGLEALYQKYKAQGLVVLGFPCNQFGAQEKADEKGIQSFCELNFGVSFPLFSKIEVNGEHTHPLYQYLKKAAPGVLGTERIKWNFTKFLVNRQGEVVARFAPTTKPEAISDKIEALLK

SEQ ID NO: 29081 - protein, 648 aa, Flaveria trinervia
MISLNSSFLERSSVTGGSRTQSQSLRLSARRPVVTSMLNSNSLPERNVSVSVDSAVRDVNAPVAVEVDRSVGEKPFAAVGGGVEDMYGEDTATEDHYITPWSVSVASGYSLLRDPHHNKGLAFTEKERDAHFLRGLLPPVVVNHDLQVKKMMHNIRQYQVPLQRYQAMMDLQQRNERLFYKLLIENVEELLPIVYTPTVGEACQKYGSIFENSQGLFISLKDKGRILEILKNWPHKKIQVIVVTDGERILGLGDLGCQGMGIPVGKLALYTALGGVRPSACLPITIDVGTNNEKLLNDDEFYIGLKQKRAAGQEYAELMNEFMSAVKQNYGENLLIQFEDFANHNAFDLLEKYRTTHLVFNDDIQGTASVVLGGLISALKLVGGSLADQKFLFLGAGEAGTGTAELIALEISKQTNIPLEESRKKVWLVDSKGLIVRSRLDSLQHFKKPWAHDHEPVNEFLDAIKTIRPTVLIGSSGTGQTFTKEVVETMSSLNEKPIILALSNPTSQSECTAEQAYTWSEGRAIFASGSPFKPVEYNGKLYVSGQANNAYIFPGFGLGLIISGAIRVHDDMLLAASEAPAEQVTQEHFDKGLIFPPFTSIRKISAHIAAKVAAKAYELGLASRLPQPENLVAYAESCMYSPKYRIYR

SEQ ID NO: 29082 - protein, 229 aa, Yersinia pestis biovar Medievalis str. 91001
MEKRMKKYLIAPSILSADFARLGEDTAKVLAAGADIVHFDVMDNHYVPNLTIGPMVCKALRDYGITAPIDVHLMVKPVDRIVPDFAKAGATYITFHPEASEHVDRTLQLIKESGCKAGLVFNPATPLSYLDYVMDKLDVILLMSVNPGFGGQSFIPETLNKLRQVRKLIDDSGYDIRLEVDGGVKVENIRQIAAAGADMFVAGSAIFNQPDYAAVIDAMRNELAMAANG

SEQ ID NO: 29083 - protein, 419 aa, Francisella tularensis subsp. tularensis SCHU S4
MSTYTVVIIIFILICISAFFSSSETAMIALNKYKLKHLAKKNHRAAKRSLSLVRNPERLLVAILIGNTFANIFAGTVISSYSEDHFGDLGLLIATIVVTILVLVFGEIIPKSFAAIYPQRLAFPFSLPLKIIMLILYPAVIFLSMVSKVTLKLFGVKIEAVNNESLDKEEIQTVVNESNAKLGAKNKNMLLGVLELDKVLVQEVMTHFNKIEYIDLSNSIDKILARIAKMRSLNIILCENGVNSIIGVIRLKEITNLLISSKKGQISKAALRKIAQEAYFIPETVSLQTQLINFQQKSKRFAIVVDEYGDVCGTVTIEDIMEEIVGEFSDRFDVNNNIRKLEDNSYLIGGSATLREINRHIGIEFESEDAKTLSGLIIEEIENLPSGPCCIKYNNILLEITNIRDNKIVSIKLTITTET

SEQ ID NO: 29084 - protein, 161 aa, Lotus japonicus
MSTLGSTCFTEEQEALVVKSWSVMKKNSAELGLKLFLKIFEIAPSAQKLFSFLRDSKVPLEENPKLKPHAMSVFVMTCESAAQLRKAGKVTVRESTLKKLGATHYKYGVVNEHFEVTKFALLDTIKEAVPEMWSPEMKNAWTQAYDQLVGAIKSEMKPSSS

SEQ ID NO: 29085 - protein, 159 aa, Prochlorococcus marinus subsp. marinus str. CCMP1375
MLINVKETVVETADGEKKNLGDYLGNVLLIVNVASLCGNTPQYKGLEKLFEKYKKNGFCVLAFPCNDFAGQEPGTIEEIKEFCSVKYGTTFEIFNKVHAKGLTTEPYTTLNKVEPKGDVSWNFEKFLVGKDGNVIARFEPSVEPSSEELITAIEVALSS

SEQ ID NO: 29086 - protein, 161 aa, Lotus japonicus
MAENTTTIAFTEEQEALVVKSWNAMKKDSAELSFKFFSKILEIAPPAKQLFSFLRDSEVPLDQNPKLKPHAMSVFLMTCESAAQLRKEGKVTVRESNLKKLGATHFKKGVIPEHFEVTKQALLDTIKEAVPELWSLELKDAWAIAHDQLASAIIAEMKPES

SEQ ID NO: 29087 - protein, 393 aa, Burkholderia xenovorans LB400
MLSAEHRAIVKATVPLLESGGEALTTHFYRILIGEHPEVRPMFNLANQASGAQPRALANSVLMYARHIDQLEQLGGLVSQIINKHVALNILPEHYPIVGQCLLRAIREVLGAEIATDAVIAAWAAAYRQLADLLIGLEEKIYAEREAAPGGWRGTRLFRVARKVRESDEITSFYLRPDDNGELLAFHPGQYIGVRLYIDGEEVRRNYSLSAMSNGCEYRISVKREANGKVSSHLHTHLNENDTIELFAPAGDFTLEPGDKPLVLISGGVGITPTLAMLQAALHTNRVVHFIHSARHGGVHAFRDTIEQLAARHPQLKRFYCYEQRRADDADADGIGYLDETRLDAWLPETRDVDVYFLGPIAFMKAVKKHLKAIGVPESQSRYEFFGPAAALE

SEQ ID NO: 29088 - protein, 229 aa, Solanum tuberosum
MPKSKRNRAVTLSKTKKKGKEHKENIVNSIRECAEKYSSAYVFSFENMRNLKFKEFRDQLKSSSRFFLGSNKVMQVALGRSDSDEIRPGLHKISKLVRGDSGLCFTNLSKEEVQRLFNEYEEHDFARTGTTATEKVELQEGPLDQFTHEMEPFLRKQGMPVRLNRGVVELVSDFVVCEEGRPLSPEAARILRLLGKKMATFRLHLICRWSPDEFEIYREGLEESDIESS

SEQ ID NO: 29089 - protein, 530 aa, Desulfitobacterium hafniense DCB-2
MSAERLQSFGEISLSKQVLQALSEMGFEEPSPIQKAAIPVAMDGVDLIGQAQTGTGKTAAFGIPICEKVNPKFQAVQALILTPTRELAVQVSEEISKIGKYRHIKPLPIYGGQSIDRQIRALRFGSQVVVGTPGRILDHLNRGTLKLQYVKMVVLDEADEMLDMGFVEDIETILKQVPKEERQVMLFSATMPPEIKKLAQNYMHQPKSVAVSRDELTVPLIEQVFYEARDKIKVDALCRIIDMEDIGQAIIFCRTKRGVDELVAALEARGYFADALHGDLSQQQRDRVMKKFRDGKVELLVATDVAARGLDIDNVTHVINFDIPQDPESYVHRIGRTGRAGRKGQAITLVSSREYRQLRLIERLIKTRIIRKELPTLADVSERQAENLKNQLVKILQRSHLGTYRSIVGSLLEEYDSMDVAAAALKFAVEGVEERSEEEDDIAFGNTGAAPGMVRLFMNIGRLQQVRPQDIVRWIADESGIPGNIIGMINIYDKFTFVEIPEQHASRVLSCMHQNMIKGRKVNVEPAKAR

SEQ ID NO: 29090 - protein, 527 aa, Glycine max
LGNLVCSASDPNGPMYYKGWYHFFYQYNPNGAVWGDIVWGHAVSRDMIHWLHLPLAMVADQWYDMQGVWTGSATILPNGEIIMLYTGSTNESVQVQNLAYPADPSDPLLVDWIKYPGNPVLVPPPGIGTKDFRDPTTAWLTSEGKWRITIGSKLNKTGIALVYDTEDFKSYELKEGLLRAVDGTGMWECVDFFPVSKKNENGLDTSVNGDEVKHVMKVSLDDDRHDYYAIGTYDEKSVLFTPDDAKNDVGVGLRYDYGIFYASKTFYDQNKERRLLWGWIGESDSEYADVAKGWASVQSIPRTVELDRKTGSNLLQWPVAEVESLRLRSDEFKNLKAKPGSVVSIDIETATQLDIVAEFEIDKETLEKTPESNEEYTCGNSGGSKQRGALGPFGLLVLADEGLFEYTPQYFYVIKGSNGNLKTSFCADQSRSSQANDVRKQIVGSAVPVLKDEKFSLRILVDHSIVESFAQGGRTVVTSRVYPTKAIYGAARLFLFNNATEATVTASLNVWQMNSAFIRPFHPDQKN

SEQ ID NO: 29091 - protein, 442 aa, Synechococcus elongatus PCC 6301
MTLSVLEQVNSDAAPISAVEQRQTVLQQLLDLGQSAAGAESLQAQARDRLTDLAIPSTKVEDWRFTDLSLLPKRSFVAAPAQAKAEFVEPLLLADVPLRAVFVDGQFRADLSSADWPEGLSLTVGFDAAIAQNLLADDLFATLNTAGFGQAAVIRVAAGAAIAQPLHLLWISSSTSETAFSQPRALIELGANSALTLIEDFAPLGNDCTADYFVNAVTEIQLGANAQLKHSRVQRDGDRAIHIGTTAVRQERDSRYHGIAVSTGAHLSRHNYLAAQDGSQAETILDGLSLADGDRLVDTHSGMFFNQPHGRSQQLHKCIASDRGRAVFSGRVVVPQIAQQTDAAQLSRNLLLSSRARIDAKPQLEIVADDVKCSHGATVSQLSEDEIFYLQSRGLNQAEATHLLIEAFAGEILQKLPSAQLREALSRCVSCRAERPEPSPAS

SEQ ID NO: 29092 - protein, 134 aa, Brassica napus
  misc_feature (90)..(90): Xaa can be any naturally occurring amino acid
  misc_feature (121)..(121): Xaa can be any naturally occurring amino acid
  misc_feature (123)..(123): Xaa can be any naturally occurring amino acid
  misc_feature (125)..(128): Xaa can be any naturally occurring amino acid
  misc_feature (130)..(130): Xaa can be any naturally occurring amino acid
  misc_feature (133)..(133): Xaa can be any naturally occurring amino acid
MGNNETSASETAAAKQKKVDDWLPITSSRNAKWWYSAFHNVTAMVGAGVLSLPYAMSNLGWGPGVTLMIMSWVITLYTLWQMVEMHEIVXPGKRFDRYHELGQEAFGEKLGLWIIVPQQLXIXEXXXXIXYMXT

SEQ ID NO: 29093 - protein, 299 aa, Glycine max
MSMMSLTTVAAFKSLTMAESCLLSLPSLFYAKNNTLSLSIPTKPLNLHLPCSNSSLFPLTTKTTRHSSLLTFVAQTSDWAKEEEEEETSWENQGDTAWGTEEGGHEEGGFAEKAEEDKIFVGNLPFDIDSENLASLFGQAGTVEVAEVIYNRATDRSRGFGFVTMSTLEELKKAVEMFSGYELNGRVLTVNKAAPKGAQPERPPRPPRSFSSGLRVYVGNLPWEVDDARLEQIFSEHGKVEDARVVYDRETGRSRGFGFVTMSSETDMNDAIAALDGQSLDGRAIRVNVAQDRPSRSSF

SEQ ID NO: 29094 - protein, 357 aa, Burkholderia vietnamiensis G4
MDGAALYEALAAAEPDPLRRDVFMQLAEAEHEHAEIWRAKLQHRGVDVATTRPTFKTRALRMLIRSFGPRFVLPALAASEFADRDKYARQTDAGALSADESTHAAVVAAVARSNPSGGVKGSDIARAESWHRGASGNDLRAAVLGANDGLVSNFCLIMGIAGAGASNKTILLTGLAGLIAGASSMALGEWLSVTNAYELAQTQIARENEELQRTPKAELRELALIYQAKGLDRDDARRVAEEMMRNRDKALDTLTREELGLDPEELGGNPWRAAGTSFGLFALGAIFPAVPFFWARGVVGIGISVSLSVLCLAVIGVVTSLFNGRSSWFSVTRQIVIGCVAAGFTYGVGALLGVSMS

SEQ ID NO: 29095 - protein, 173 aa, Arabidopsis thaliana
MRPLDETETTVVFEKLFKFVGNNLKKIVENPSDEGPESTPGSYCFRLQKNRVYYEKPSLFGTCIGKYTHAGSFHLTIMSLNILAANAKHKVWLKPTSEMSFLYGNHVLKGGLGRITDSIVPGDGVVVFSMSDVPLGFGIAAKSTQDCRKLDPNGIVVLHQADIGEYLRGEDDL

SEQ ID NO: 29096 - protein, 419 aa, Ralstonia metallidurans CH34
MAIVDVKVPQLSESVAEATMLNWKKKPGEAVAQDEILIEIETDKVVLEVPAPSAGVLSQIIKNDGDTVVADEVIAKIDTAATAGAVAPAAAAPAPAAAAPAPAAAAPAAAASAGAIAMPSAAKLMAEGGLSASQVAGTGKDGRITKGDVLAAGSAPAPAAKAAPAPAAAKPALPQVSAQVDFAALGDRPEERVPMSRLRARIAERLIQSQSTNAILTTFNEVNMKPVMDLRAKYKDRFEKEHGVKLGFMSFFVKAAVHALKKYPVINASVDGNDIVYHGYFDIGIAVGSPRGLVVPILRNADQMSLADIEKKIAEFGTKARDGKLSLEELTGGTFSISNGGTFGSMLSTPIINPPQSAILGVHATKDRAVVEDGQIVIRPMNYLAMSYDHRIIDGREAVLGLVAMKEALEDPARLLLDL

SEQ ID NO: 29097 - protein, 265 aa, Silicibacter sp. TM1040
MAEESARVSVEIRDHVAHVTLTRADKMNAVDKHMLAAVIAAAKEVAASDARAVVLSGAGKSFCAGLDVMSFAAMGQMQDTGWIMDRTEGEANDFQAVAMMWRALEIPVIAALQGATFGAGLQIALGADIRIAAPDAKLAVMEMKWGLVPDMGGMALLPQLVRSDVLRLLTYSATPIEATQAETWGLVTEVAEDPLARAEALAAEIAGKGPRAIRAAKRLIAYAESGASTADVLLRESEEQAALIGKPEQMEIVMANMQKRAPVFK

SEQ ID NO: 29098 - protein, 365 aa, Debaryomyces hansenii CBS767
MFRQITRQSAISPRFTRSYIAGQFTGSKKSNGKYTVTLIEGDGIGPEISQSVKDIYAAAKVPIEFESVDVTPLLIDGKTTLPQPAVDSVNKNLVALKGPLATPVGKGHTSMNLTLRRTFNLFANVRPCKSVVGYDTPYENVDTVLIRENTEGEYSGIEHTIVPGVVQSIKLITKPASEKVIRYAFEYAKSINKPHVLVVHKASIMKLSDGLFVSTAKEIGKEYPDIKLDYELLDNTSLKLTADPADYKDVVMVMPNLYGDIMSDLSSGLIGGLGLTPSGNMGNKVSIFEAVHGSAPDIAGKGLANPTALLLSSCMMLRHMSLNSDADKIEKAVLDTIASGKENRTGDLYGTSSTQNFTEQVITRL

SEQ ID NO: 29099 - protein, 90 aa, Hordeum vulgare subsp. vulgare
AITCGQVSSALGPCAAYAKGSGTSPSAGCCSGVKRLAGLARSTADKQATCRCLKSVAGAYNAGRAAGIPSRCGVSVPYTISASVDCSKIH

SEQ ID NO: 29100 - protein, 559 aa, Klebsiella pneumoniae
MDKQYPVRQWAHGADLVVSQLEAQGVRQVFGIPGAKIDKVFDSLLDSSIRIIPVRHEANAAFMAAAVGRITGKAGVALVTSGPGCSNLITGMATANSEGDPVVALGGAVKRADKAKQVHQSMDTVAMFSPVTKYAIEVTAPDALAEVVSNAFRAAEQGRPGSAFVSLPQDVVDGPVSGKVLPASGAPQMGAAPDDAIDQVAKLIAQAKNPIFLLGLMASQPENSKALRRLLETSHIPVTSTYQAAGAVNQDNFSRFAGRVGLFNNQAGDRLLQLADLVICIGYSPVEYEPAMWNSGNATLVHIDVLPAYEERNYTPDVELVGDIAGTLNKLAQNIDHRLVLSPQAAEILRDRQHQRELLDRRGAQLNQFALHPLRIVRAMQDIVNSDVTLTVDMGSFHIWIARYLYTFRARQVMISNGQQTMGVALPWAIGAWLVNPERKVVSVSGDGGFLQSSMELETAVRLKANVLHLIWVDNGYNMVAIQEEKKYQRLSGVEFGPMDFKAYAESFGAKGFAVESAEALEPTLRAAMDVDGPAVVAIPVDYRDNPLLMGQLHLSQIL

SEQ ID NO: 29101 - protein, 357 aa, delta proteobacterium MLMS-1
MKKIAVLPGDGIGPEVMREAIKVLEAAQRKFDFTLSYDYADVGGCAIDRHGRALPHATLELCRQSDAILFGSVGGPKWESLPPEQQPERAALLPLRKEFELFCNLRPARVFPSLAAASPLKPEIVGNGFDLLVVRELTGGIYFGQPKGREGSGPEEKAFDTMIYSRREIDRIARRAFEAARLRRGIVTSVDKANVLTTMVLWREVVKEVAADYPDVTLNHIYVDNAAMQLIRNPHQFDVLLCGNMFGDIISDECAMITGSMGLLASASLNESGFGLYEPAGGSAPDITGLGIANPIAQILSAAMMLRYSFQLGQAADTIERAVAKALATDILTPDIAADPSQAVSTEEMGTAIANGL

SEQ ID NO: 29102 - protein, 623 aa, Chlamydomonas reinhardtii
MATTESSAPAATTQPASTPLANSSLYVGDLEKDVTEAQLFELFSSVGPVASIRVCRDAVTRRSLGYAYVNYNSALDPQAADRAMETLNYHVVNGKPMRIMWSHRDPSARKSGVGNIFIKNLDKTIDAKALHDTFSAFGKILSCKVATDANGVSKGYGFVHFEDQAAADRAIQTVNQKKIEGKIVYVAPFQKRADRPRARTLYTNVFVKNLPADIGDDELGKMATEHGEITSAVVMKDDKGGSKGFGFINFKDAESAAKCVEYLNEREMSGKTLYAGRAQKKTEREAMLRQKAEESKQERYLKYQSMNLYVKNLSDEEVDDDALRELFANSGTITSCKVMKDGSGKSKGFGFVCFTSHDEATRPPVTEMNGKMVKGKPLYVALAQRKDVRRATQLEANMQARMGMGAMSRPPNPMAGMSPYPGAMPFFAPGPGGMAAGPRAPGMMYPPMMPPRGMPGPGRGPRGPMMPPQMMGGPMMGPPMGPGRGRGGRGPSGRGQGRGNNAPAQQPKPAAEPAAAPAAAAPAAAAPAAAAEPEAPAAQQPLTASALAAAAPEQQKMMIGERLYPQVAELQPDLAGKITGMLLEMDNAELLMLLESHEALVSKVDEAIAVLKQHNVIAEENKA

SEQ ID NO: 29103 - protein, 90 aa, Hordeum vulgare subsp. vulgare
AISCGQVSSALSPCISYARGNGAKPPAACCSGVKRLAGAAQSTADKQAACKCIKSAAGGLNAGKAAGIPSMCGVSVPYAISASVDCSKIR

SEQ ID NO: 29104 - protein, 331 aa, Photorhabdus luminescens subsp. laumondii TTO1
MTIKVGINGFGRIGRIVFRAAQERSDIEIVAINDLLDAKYMAYMLKYDSTHGRFNGTVEVKDGHLIVNGKAIRVTAERDPANLKWNEVGVDVVAEATGIFLTDETARKHIAAGAKKVVLTGPSKDDTPMFVMGVNHKAYAGQEIVSNASCTTNCLAPLAKVINDKFGIVEGLMTTVHATTATQKTVDGPSAKDWRGGRGAAQNIIPSSTGAAKAVGKVIPELNGKLTGMAFRVPTPNVSVVDLTVRLEKPATYQQICDAIKDAAEGELKGVLGYTEDDVVSNDFNGEKLTSVFDAKAGIALNDNFVKLVSWYDNETGYSNKVLDLIAHISK

SEQ ID NO: 29105 - protein, 222 aa, Triticum aestivum
AIGIARGLEYLHHSCNTRIVHFDIKPPNILLDKDFNPKIADFGLAKLCQTKESKLSMTGARGTIGFIAPEVHSRTFGVVSTKSDVYSYGMMLLEMVGGRRNVKSIVAKSSEKYFPDWIYDHFAQDDGLQACEVTREIEEIARKMTFIGLWCIQVLPMYRPTITKVLEMFERRLDDLDMPPKQNFCELLESSAQNLDVKSSCSTKPEEISLVNSKILQQSPTL

SEQ ID NO: 29106 - protein, 545 aa, Staphylococcus aureus subsp. aureus MRSA252
MIKDKQLHNEKINLSQLVLLGLGSLIGSGWLFGAWEASSIAGPAAIISWVLGFLVIGTIAYNYIEIGTMFPQSGGMSNYAQYTHGSLLGFIAAWANWVSLVTIIPIEAVSAVQYMSSWPWHWAKPMKHLMENGSISTYGLLAVYLIIVIFSLLNYWSVKLLTSFTSLISVFKLGVPMLTIIMLMLSGFDTSNYGHSASTFMPYGSAPIFAATTASGIIFSFNSFQTIINMGSEIKNPEKNIARGIAISLSISAVLYIILQSTFITSMPQSMLQHSGWNGINFNSPFADLAILLGINWLAILLYIEAFVSPFGTGVSFVAVTGRVLRAMEKNGHIPKFLGKMNEKYHIPRVAIIFNAIISMIMVTLFRDWGTLAAVISTATLVAYLTGPTTVIALRKMGPTMTRPFRAKILKVMAPLSFVLASLAIYWAMWPTTAEVILIIILGLPIYFFYEYRMNWRNTKKQIGGSLWIIVYLIVLSILSFIGSKEFKGLNMIHYPFDFIVIIIVALIFYYIGTTSSFESVYFRRATRINTKMRESLNNESKSSY

SEQ ID NO: 29107 - protein, 421 aa, Magnetospirillum magnetotacticum MS-1
MHHLIVGAGPAGVTAAEIIRELEPEATITLVGDEPEPPYSRMAIPYMLVGKVGEDGTYLRKGPNHYDRLGITLMPGRRMTGLDPAAKRIALDGGESLAYDRLLLALGARPMRPPIEGLDLPGVHTCWTLADARKIAEEAIPGSHVVLMGAGFVGTIVLEALALRQVSLTVVEMGDRMVPRMMDEVAGGMLKRWCEAKGVRVLTGTGIRRITQAESAADTRDSLVVELSDGATLPAHLVVVSAGVRSNTEAVAASGIALGNGILVDDHMRTSLPHVFAAGDVAQGRDFMSGEAHVHAIQITAAAHGRIAAYNMTGNDQAYHGSLNMNVLDTLGLITCSFGSWQGNGGHCARLVDEAGFRYLRLEFDGTSDVVIGAQAVGTTDHVGALRGLIQSKRRLGPAVKEQMMADPTRFMNGFVQTLHR

SEQ ID NO: 29108 - protein, 386 aa, Colwellia psychrerythraea 34H
MFELMEDHSEEAIIKVIGVGGGGGNAVEHMVSQTIEGVEFVTANTDSQALRNSSADVTLQLGADVTKGLGAGANPEIGRCAAEEDRETIKQALQGADMIFIAAGMGGGTGTGAAPVVAEIAKEMGILTVAVVTKPFPFEGKKRMNYADQGIEFLSKSVDSLITIPNEKLLKVLGPGTSLLDAFKAANNVLLGAVQGIAELITRPGLINVDFADVRTVMSEMGTAMMGSGTASGDDRAQEAADAAISSPLLEDVDLAGARGILVNITAGMDISIDEFETVGNAVKAFASENATVVVGAVIDMDMTDELRVTVVATGIGAESKPDITLVNPMPMAEAKVVGGDYTPAAPQANLATEAIAMTDSNAQKAAATDLDTYLDIPAFLRKQAD

SEQ ID NO: 29109 - protein, 354 aa, Triticum aestivum
  misc_feature (144)..(144): Xaa can be any naturally occurring amino acid
  misc_feature (159)..(159): Xaa can be any naturally occurring amino acid
  misc_feature (169)..(169): Xaa can be any naturally occurring amino acid
  misc_feature (180)..(180): Xaa can be any naturally occurring amino acid
  misc_feature (212)..(212): Xaa can be any naturally occurring amino acid
MATLRCTNHTLLGSPTCLARPRRAVVRAAVAVQAEAQPKVSLIRIGTRGSPLALAQARQTRDELKAAHTELAEDGAIEIVIIKTTGDMILDKPLADIGGKGLFTKEIDDALLQGSIDIAVHSMKDVPPYLPRGMIIPCNLPTRXNLRDALICLAAETLXGGFPAGSVIXSASLRGQFQIXYKYPSLKVVNLRGNVQTRLRKLKEGDVHATLXLALAGLKRLDMPETATSVLSVDEMLPAVAQGAIGITCRSNDDKMMEYLSSLNHEDTRLAVACEREFLSVLDGNCRTPIAAYAYRDKDGNCSFRGLLASPDGSIVYETSRSGTYSFDDMVAIGQDAGHELKSKAGPGFFDGLQ

SEQ ID NO: 29110 - protein, 90 aa, Nostoc sp. PCC 7120
MEIKIEHQPSPEILQKLGVFQWGLWQKEVSKFPWTYDTQETCYFLEGDVIVTPDGGQPVQMGKGDLVTFPVGMSCIWEIKSGVKKHYSFD

SEQ ID NO: 29111 - protein, 598 aa, Oryza sativa (indica cultivar-group)
MGVLGSRVAWAWLVQLLLLQQLAGASHVVYDDLELQAAATTADGVPPSIVDSELRTGYHFQPPKNWINDPNAPMYYKGWYHLFYQYNPKGAVWGNIVWAHSVSRDLINWVALKPAIEPSIRADKYGCWSGSATMMADGTPVIMYTGVNRPDVNYQVQNVALPRNGSDPLLREWVKPGHNPVIVPEGGINATQFRDPTTAWRGADGHWRLLVGSLAGQSRGVAYVYRSRDFRRWTRAAQPLHSAPTGMWECPDFYPVTADGRREGVDTSSAVVDAAASARVKYVLKNSLDLRRYDYYTVGTYDRKAERYVPDDPAGDEHHIRYDYGNFYASKTFYDPAKRRRILWGWANESDTAADDVAKGWAGIQAIPRKVWLDPSGKQLLQWPIEEVERLRGKWPVILKDRVVKPGEHVEVTGLQTAQADVEVSFEVGSLEAAERLDPAVAYDAQRLCSARGADARGGVGPFGLWVLASAGLEEKTAVFFRVFRPAARGGGAGKPVVLMRTDPTKSSRNPNMYQPTFAGFVDTDITNGKISLRSLIDRSVVESFGAGGKACILSRVYPSLAIGKNARLYVFNNGKAEIKVSQLTAWEMKKPVMMNGA

SEQ ID NO: 29112 - protein, 248 aa, Glycine max
MGSMGNSNPNLNPNPNPNPWTPKDCSEGICSIYCPQWCYKVYSPPPPILLGDGDDDPSGFEFSPLIVAVIGILASTFILVTYYTIISRFCRRRNNTNDSTEDDGNSELARVSSSANSGLDEALIKSITVCKYNKRGGLVEGHDCSVCLSEFEENEDLRLLPKCNHAFHLPCIDTWLKSHATCPLCRASVTACPNPNSSMEPPPRVIVNALEHQQRSNHVVVVVESSEEQEKVVSFDAHTLSDGEGYHT

SEQ ID NO: 29113 - protein, 848 aa, Yersinia pestis biovar Medievalis str. 91001
MSKIKIAIIGNGMVGHRFIEDLLDKADKDQFDITVFCEEPRIAYDRVHLSSYFSHHTAEELSLVREGFYEKQGVKVLVGERAITINRAEKVIHSNSGRSLYYDKLVMATGSYPWIPPIKGSEGQDCFVYRTIEDLNAIEACTRRSKRGAVIGGGLLGLEAAGALKSLGVETHVIEFAPVLMAEQLDPMGGDQLRQKIERMGVRVHTGKNTQEIVHSGQNSRKTMLFADGTQLEVDFIVFSTGIRPQDKLANQCGLATARRGGIAINDYCQTSDPDVYAIGECASWQERTFGLVAPGYKMAQVAADHLLGRENAFLGADMSAKLKLLGVDVGGIGDAHGRTEGARSYVYLDESKEIYKRLVVSADNKTLLGAVLVGDTTDYGNLLQLALNNITLPENPDSLILPAHAGNKPTIGVDSLPDSAQICSCFDVTKGDIIRAIGQGCQTVAALKSATKAGTGCGGCIPLVTQVLNAELSKQGIEVNNHLCEHFAYSRQELYHLIRVEGIKTFTELREKYGKGYGCEVCKPTVGSLLASCWNEYVLEPQHTPLQDTNDNFLGNIQKDGTYSIIPRSPGGEITPDGLLVVGQIAKEYNLYTKLTGSQRIGMFGAQKDDLPAIWARLIDAGFETGHAYAKALRMAKTCVGSTWCRFGVGDSVGFGVALEHRYKGIRAPHKIKFGISGCTRECAEAQGKDVGIIATENGWNLYVCGNGGMKPRHADLLAADLDEETLMRYLDRFMMFYIRTADKLQRTSVWLESLEGGIRYLQLVILEDKLGINDQLEAEIARLRDKVACEWKATVENPAAQVRFAHFINSSLRDPNVQVVREREQHRPARPDERIPVRVLELEDNA

SEQ ID NO: 29114 - protein, 357 aa, Crocosphaera watsonii WH 8501
MTATLQAPPKTHRVVFPFTAIVGQEEMKLALLLNVIDPKIGGVMIMGDRGTGKSTTIRALADLLPEIDVVENDPFNSHPSDPDLMSDSVRQMLEEQGSLPISHKKVIMVDLPLGATEDRVCGTIDIEKALSEGVKAFEPGLLAKANRGILYVDEVNLLDDHLVDVLLDSAASGWNTVEREGISIRHPARFVLVGSGNPEEGELRPQLLDRFGMHAEIHTVKEPNLRVQIVEQRSEFDGDPQQFCETYQTQQDDLQNSLVQAQNLLPSVNIDYDLRVKISEVCSELDVDGLRGDIVTNRASKALAAFEGRTEVTVDDIRRTMVLCLRHRLRKDPLETIDSGYKVEKAFNRVFGIETEE

SEQ ID NO: 29115 - protein, 586 aa, Oryza sativa (indica cultivar-group)
MATARARAALVFVALLQMAAVVVVRASHVVYPELQSLEAKHVDGKLRTGYHFQPPKHWINDPNGPMYYKGLYHLFYQYNPKGAVWGNIKWAHSVSTDLIDWTALEPGIYPSKTFDEKGCWSGSATVLPSGVPVIMYTGIDPDERQVQNVAYLVNLSDPYLREWHKPDYNPIVNPDGGINASAFRDPTTAWYGPDGHWRLLVGSKVNMKGLAVLYRSRDFKKWVKAHHPLHSAHTGMWECPDFFPVAVAGGSRHYRRGVDTAELHDAAVAEEVKYVLKVSLDLTRYEYYTVGWYDHATDRYVPDAAFPDNDYGLRYDYGDFYASKSFYDPAKRRRIVWGWANESDTVPDDRRKGWAGIQAIPRKLWLSADGKQLVRWPVEELKALRAKHVNVTDKVIKKGNYFEVTGFKSVQSDVDMAFAIKDLSKAEEFDPAWRTDAEALCKKLGSDVDGGVGPFGLWALASGDLKERTAVFFRVFKANDSSHVVLMCNDPTRSSYESKIYRPTFAGFVDVDIAKNKQIALRTLIDHSVVESFGARGKTCILTRVYPRKAVGDDAHLFVFNNGESDVKVTNLDAWEMKTPKMNAEE

SEQ ID NO: 29116 - protein, 142 aa, Crocosphaera watsonii WH 8501
MRLLHTMLRVKDLEESLKFYCDILGMKLLRQKDYPGGEFTLAFVGYGDESDNSVIELTYNWGVDSYDLGDAYGHIALGVHDIYGTCEKIREQGGNITREPGPMKHGTTVIAFVEDPNGYKVELIQIGTQGSAKKETETAKAA

SEQ ID NO: 29117 - protein, 374 aa, Bromheadia finlaysoniana
MAPVPFLPTAVTENTLRESFVRDEDERPKVAYNVFSHEIPVISLRGSTMREMEVEIEICWKIVAACEDWGIFQVVDHGVDAGLIADMTRLAREFFELPPEEKLRFDMSGGKKGGFIVSSHLQGEVVQDWREIVTYFSYPIRTRDYSRWPDKPEGWRAVVEEYSAKLMELACNLLGVLSEAMGLDREALAQACVDMDQKLVVNFYPKCPQPDLTLGLKRHTDPGTITLLLQDQVGGLQATKDGGETWITVQPVQNAFVVNLGDHGHYLSNGRFKNADHQAVVNSNCSRLSIATFQNPAPDGVVYPLAVREGEKPVMEEAITFAEMYRRKMSRDLELARLKKMGKMESKQKGAAGENAEAIGAAATKPKALNEILA

SEQ ID NO: 29118 - protein, 313 aa, Haloarcula marismortui ATCC 43049
MTGWTIEDMPPLRDRTVVVTGANSGLGLEGSKAFARRGATVVMACRSVERGESAAAEIREAVPNATLDVRECDLADLSNVASFADGLRADYDAVDILCNNAGVMAIPRSETADGFETQFGVNHLGHFALTGHLLDLLGAADGESRIVTQSSGAHEMGEIDFDDLQRERSYGKWSAYGQSKLANLLFAYELQRRLGNHGWDDVLSVACHPGYADTDLQFRGPREMGSTLRTAAMGVANAVFAQSAEQGALPMLYAATAEDVIGGEYVGPGGLFDMRGSPEFQQSNDASQDEETAEQLWAVSTDLTGVEYDFERT

SEQ ID NO: 29119 - protein, 487 aa, Bacillus licheniformis ATCC 14580
MAEIRKLRNYINGEWVESKTDKYEDVVNPATKEVLCQVPISTREDIEYAAQTAAEAFKTWSKVAVPRRARILFNFQQLLTQHKEELAHLITIENGKNTKEALGEVGRGIENVEFAAGAPSLMMGDSLATIATDVEAANYRYPIGVVGGIAPFNFPMMVPCWMFPMAIALGNTFILKPSERTPLLTEKLVELFEKAGLPKGVFNVVYGAHDVVNGILEHPEIKAISFVGSKPVGEYVYKKGSENLKRVQSLTGAKNHTIVLNDANLEDTVTNIIGAAFGSAGERCMACAVVTVEEGIADEFMEKLVQKASEVKIGNGLDDGVFLGPVIREDNKKRTLGYIQKGIEEGARLVCDGRENVTDEGYFVGPTIFDNVTTDMTIWKDEIFAPVLSVIRVKNLKEAVEIANQSEFANGACLFTSNSNAIRYFRENIDAGMLGINLGVPAPMAFFPFSGWKSSFFGTLHANGKDSVDFYTRKKVVTARYPAPDFN

SEQ ID NO: 29120 - protein, 217 aa, Wolbachia endosymbiont strain TRS of Brugia malayi
MVQATYASISLPGISSVEDVLEDARFGKLFILVDDENRENEGDLIVLAEKLKPEHVAFMVRYGTGIVFLAMTRLHMGRLGLEFMRRSNIDEKLTPHTAFTTSIDARYGIATGVSAHDRTHTILTAIDGKSTQDDIITPGHVFPIIANDGGVLARNGHTEASVEIAKLIGYNHAAVGCELVNDDGSMMRLPELLKFAEQHNIKLTTIDKLIRYIKKLS

SEQ ID NO: 29121 - protein, 550 aa, Vibrio angustum S14
MLKNINPTQTQAWQDLTAHFEQAQDFQLSDLFANDSARFSKFSAQFGSDILLDYSKNLITEETLTKLFALAKETELDAAIADMFSGEKINRTEDRAVLHVALRNRSNTPIMVDGEDVMPAVNAVLEKMKSFSDRIISGEWKGYTGKEITDIVNIGIGGSDLGPYMVSEALGAYKTRLNMHFVSNVDGTHIAETLKDLNPETTLFLIASKTFTTQETMTNALSARDWFLAKAEDKAHVAKHFAALSTNGEAVTEFGIDTDNMFEFWDWVGGRYSLWSAIGLSICLSVGFDNFVALLDGGHAMDKHFAEAPLEQKLPVILALIGIWYNNFHGAETEAILPYDQYMHRFAAYFQQGNMESNGKYVDRGGNPVDYQTGPIIWGEPGTNGQHAFYQLIHQGTKLIPCDFIAPAISHNPLGDHHPKLMANFFAQTEALAFGKSREKVEAEFFAAGKSQEEVNELAEFKVFEGNRPTNSILVKEITPYTLGALIALYEHKIFTQGVIWNIFSFDQWGVELGKQLANQILPELNNKEEVSSHDSSTNGLINAFKQWRA

SEQ ID NO: 29122 - protein, 112 aa, Neisseria meningitidis MC58
MKKIEAIVKPFKLDDVREALTEIGITGMTVSEVKGFGRQKGHTEIYRGAEYAVDFLPKIKIELVLADDAVERAIDVIVEVARSGKIGDGKIFVLPVEEAIRIRTGERSDAAV

SEQ ID NO: 29123 - protein, 513 aa, Arabidopsis thaliana
MFETEHHTLLPLLLLPSLLSLLLFLILLKRRNRKTRFNLPPGKSGWPFLGETIGYLKPYTATTLGDFMQQHVSKYGKIYRSNLFGEPTIVSADAGLNRFILQNEGRLFECSYPRSIGGILGKWSMLVLVGDMHRDMRSISLNFLSHARLRTILLKDVERHTLFVLDSWQQNSIFSAQDEAKKFTFNLMAKHIMSMDPGEEETEQLKKEYVTFMKGVVSAPLNLPGTAYHKALQSRATILKFIERKMEERKLDIKEEDQEEEEVKTEDEAEMSKSDHVRKQRTDDDLLGWVLKHSNLSTEQILDLILSLLFAGHETSSVAIALAIFFLQACPKAVEELREEHLEIARAKKELGESELNWDDYKKMDFTQCVINETLRLGNVVRFLHRKALKDVRYKGYDIPSGWKVLPVISAVHLDNSRYDQPNLFNPWRWQQQNNGASSSGSGSFSTWGNNYMPFGGGPRLCAGSELAKLEMAVFIHHLVLKFNWELAEDDQPFAFPFVDFPNGLPIRVSRIL

SEQ ID NO: 29124 - protein, 404 aa, Photobacterium sp. SKA34
MKRAVITGMGIVSSIGNNVAEVLESLKTGKSGINFSEQFAEMKLRSNVWGDLKINPAEHIDRKKMRFMGDAAAFAYLSMEQAVADSGLAEDQVSNERTGLVAGSGGASSHNQYLAVDTLREKGVKRVGPYMVPRTMSSTVSACLATPFKIRGVNYTMSSACATSAHCIGHALELIQLGKQDVVFAGGGEELDWSLTMMFDAMGALSTKYNDDPSKASRTYDADRDGFVISGGGGMVVVEELEHALARGAKIYGEIVGYGATSDGYDMVAPSGEGAVRCMKMAMQDLDAPVDYINTHGTSTPVGDVKELGAIQELFSDNCPAISATKAMTGHALGAAGVHEAIYSTLMLEHGFVAPSINIDNLDEAAQGLDIVTDKRDVELKTVMSNSFGFGGTNATLVIKKYEA

SEQ ID NO: 29125 - protein, 291 aa, Triticum aestivum
MATGSEAGKSAEVVLEWPKQDKKRMLHAVYRVGDLDRTIKCYTECFGMKLLRKRDVPEEKYTNAFLGYGPEDTNFALELTYNYGVDKYDIGAGFGHFAIANEDVYKLSETIKSSDCCKITREPGPVKGGSTVIAFAQDPDGYMFELIQRGPTPEPLCQVMLRVGDLDRAIMFYEKALGMKLLRKKDVPQYKYTIAMMGYAEEDKTTVLELTYNYGVTEYNKGNAYAQVAIGTDDVYKSAEAVELVTKELGGKILRQPGPLPGLNTKITSFLDPDGWKVVLVDHADFLKELH

SEQ ID NO: 29126 - protein, 178 aa, Medicago truncatula
MVMGEMRKSFKDSLKALEADIQFANTLASDYPSETDGARFQMRLSYSPAAQFLLFMFKWTDCHLAGALGLLRVLVYKTFEDGKTTMSVYERKASLKEFYGVIFPSLLQLQRGITDVEERKQKDLCATKYKPKDVIGKGKLSEIDLEREEECPICMEMNNKVVLPNCYHSLCMRCYNDW

SEQ ID NO: 29127 - protein, 357 aa, Saccharophagus degradans 2-40
MSKKIVLLPGDGIGPEIVAEAKKVLEAVDAKFKLGLKFEEDLIGGCAIDVHGVPLAQSTLDRCKAADAVLMGSVGGPKWDALDSNIRPEKGLLKIRYEMGLYANLRPAILYPQLADASSLKPEIVSGLDILIVRELTGGIYFGEPRGIRLLDNGERQGYNTYVYAEHEIERIGRTAFEMAMKRDKKVCSVDKANVLEATVLWREVIQSISKDYPEVELSHMYVDNAAMQLVRAPKQFDVVVTGNMFGDILSDTAAMLTGSIGMLPSASLNQDSKGLYEPVHGSAPDIAGQGVANPLATILSAAMMLRYSLNEAAAADAIEAAVGAVLDDGLRSADIFSEGMKKVSTQEMGDAVAAKI

SEQ ID NO: 29128 - protein, 129 aa, Thermoplasma acidophilum
MSWQEAEVRELKVGRYILIDDAPCKIVEITMSKPGKHGEAKGRIVAIGVFDNQKRSVVYPVKHKVKIPIIEKKNAQVLSVQNNEVQLMDSETFETFVLPLDPEIADKIKPGMEVPYWETMGMRKIMLQN

SEQ ID NO: 29129 - protein, 322 aa, Saccharomyces cerevisiae
MSIVALKNAVVTLIQKAKGSGGTSELGGSESTPLLRGSNSNSSRHDNLSSSSSDIIYGRNSAQDLENSPMSVGKDNRNGDNGSDNEKANLGFFQSVDPRVISDLIIGLSDGLTVPFALTAGLSSLGDAKLVITGGFAELISGAISMGLGGYLGAKSESDYYHAEVKKEKRKFYDNSNLINREIEDILLEINPNFSDETIVSFIKDLQRTPELMVDFIIRYGRGLDEPAENRELISAVTIGGGYLLGGLVPLVPYFFVSDVGTGLIYSIIVMVVTLFWFGYVKTKLSMGSGSSTSKKVTEGVEMVVVGGVAAGAAWFFVKLLG

SEQ ID NO: 29130 - protein, 164 aa, Arabidopsis thaliana
  misc_feature (23)..(23): Xaa can be any naturally occurring amino acid
  misc_feature (26)..(26): Xaa can be any naturally occurring amino acid
  misc_feature (52)..(52): Xaa can be any naturally occurring amino acid
  misc_feature (149)..(149): Xaa can be any naturally occurring amino acid
ITVPCTLVRRSGKRILAQLILEXNPXFEAEPMLLFFILFPLLGAIGALGDRXNFVDDPPTGLEKAVIPPGKNVRSALGLKEQGPLFGFTKANELFVGRLAQLGIAFSLIGEIIPGKGALAPLSNQAGMPIQDIEPLVLLNAALLLFACXNPGNAEFITDDGQHS

SEQ ID NO: 29131 - protein, 1531 aa, Debaryomyces hansenii CBS767
MGRYRDRNRETDENDDTNRQATMTTTLVQQHSRQSLGKFVNPSPTKYESTENMDKVVQSVTNATKRLSQISTNTNSSAKKRKTQNRIGPWKLGRTLGRGSTGRVRLAKNVNSGKLAAVKIVPKSNFKKLENPKYKRNSVDSSGSVKDRLPYGIEREIIIMKLISHPNIMGLYDVWENKNDLYLILEYIEGGELFDYLIKKGKLQEFEAISYFKQIINGIHYLHQFNICHRDLKPENLLLDFNKNIKIADFGMAALEVREKLLETSCGSPHYASPEIVAGKNYHGAPSDIWSCGIILFALLTGHLPFDDENIRKLLLKVQNGKFLMPNNLSSESKDLISKMLKVNPSERITIDAILQHPLLTKYPEPSVRKDKVTEYSDLNIRPIDSINNIDKEILKNLSVLFHNRDEQTIISKLLSPEDCSEKTFYYLLVKYRNEHLTASNNTINNYEDDPDLTGSESKQTITRSTSIVKTTTTDPLTGEKHTTIRKIPNSTSNFSNRSRSPKKKPEVLGNITNTAPTFKASTSFNKKKTLMNNNVISRNNSSKSLRKRPPQQQPPKLSRKISGMPDLNDLRLEKTQLNSLYKQQKLNGSFGNKSLFNFESVCQEIFGNAEQHEGDRKIEPKENLRKDKQMDGRTGKLSNIEKCERELAAKVHEKNDARALKLQHQQKEEDAKLQHKKQLESKKRDQSKLLQEKQRQALEKLGSQIQDNNDNNRRGIAHRTQQRHVTEPAPTSSLDPKLGGGAKSLLRAKSLASPSSYVSLRQNTHTSDNTSKVLQTLGIEVAPLKTSTKFNSNLKTSSSKNLSDYLDNETLYSRSDKSIEHQKENISMNKFNEKEKVNQSIAKPNYSRTSTSKLQPLAISRTTTLNSIGYRSLLDGIDENKVQKDLPKRPNGEKDYDTTLSTIETRKNGLIPNPRFSRFSFNGLLNSRFDNPDVTIQNNLVSSGTVVRKSVNQKEPISSRIIEEDPQTSHLKLETGSLKKSSTNLLGLGIVQNHQGKTSRKVSQNSEYCDSNFISVNLSDTADDSQDNTTLEENAISLSHANSVLKDDHANTTVSNTTISKQQEVLNTNVDQRNKRKSSYLGNLEGSKETLVENDKEDKSFQDSIKSMYKDYAKLYNDKKPKSETNTQELGETDDNIPSEKQTRERQSILRDDRINSIDSDNDLSFAADGSSNIDILDSSSIADTNMIENRSEIQLNDNKYSPTITDNQKDFGDEYEDEIDDQFSQHGDQQEYNHEYDHENNHEYNQEDGQEQHEHDHNQQNDQQLQDSDRLQTGTDLRKSTASTQIFSTMNLPKIRDKNSVVEENKEIKHSEVKSEESNQRHNSIFNKLKPKREAPKPPGFKWDDEKSQGHNRFSRISVSSKFDKQQKLNDNYNDSSKSNWFMKFINSLTANSKTPKGEKRKSLIRKFNSDKLDDNETKNFCVLDSTLQSSELTRVIKDTLELKKIEGSVSKVDIDEDFGMISGVIPARYSGGRRLRFKIEIINLKNSSSLHLSKLKGTDKGFKNLTNTVKFIVSKEEQNINRMSSVEA

SEQ ID NO: 29132 - protein, 221 aa, Zea mays
MASVASARCYGLLLPPSFAGARCCSRPSSSLRLRPRWGLRRPRTPLACVAPPDSAEPQTDEQAVKAESIQEDAPTSTPEDAGLPALPNKDLNRRRLNLSEISLKDVAANAVPYEESIGSFPKTKVISWDRVNFVMLNVDSTKWEQELDEIGVEGIPHFAFLDKEGNEEGNVVGRLPKQYFLDNVVALASGNPSVPDARVVGQFSSAESRKVHQVADARSHG

SEQ ID NO: 29133 - protein, 660 aa, Oryza sativa
MRVIYVLCVLGVLVPDAAGGRRHHRRHDCPPFTCGHLSDVSFPFRRRGDPPECGVQSYELTCADDKATIQIDKETYSVSDINYGDSTLWVVDASFLDSRSSCLLPRWNPLLRDPRLQAKSHHIIELAPPVGVTWASFVNCSQEIRNSSWMYMPVACLSTSRSFVYVFTGQQSAYIQNLEPSCGYLATTPLGGSKLNSTSALQNVSYQDVVKANDDLDLPFDFLSQVSGWNFKECLALSIRQTGTGSKERIANIAIIDFYFWSCFLLGDRSHNNLIYTYMVVDTALLILKWTAVLCRFVLAPLAVFIFLAHKYWRNKITIDAVEKFLQMQLTLGPTRYAYTDLTAITGHFGEKLGQGGYGSVYKGVLPGYVNVAVKVLENANCNGEEFISEVSTIGRIHHVNVVRLVGFCSKELRRALVYEYMPRGSLNKYIFSSKRSFSWDKLNEIALGIARGINYLHQGCDMQILHFDIKPHNILLDDNFVPKVADFGLAKLYPRDNSFVPLNALRGTIGYIAPEMISRSFGVISSKSDVYSFGMLLLEMAGGRRNSDMHAGNSSQAYYPSWVYDRLIEQQVGVGEISAATVANMHELERKLCIIGLHCIQMKSHDRPTMSEVIEMLEGGVVGLQMPPRPFFCDDESMSPMMDSYQFSSGLTEILEEDE

SEQ ID NO: 29134 - protein, 157 aa, Triticum aestivum
  misc_feature (137)..(137): Xaa can be any naturally occurring amino acid
  misc_feature (151)..(151): Xaa can be any naturally occurring amino acid
MAKKRKRSSDAPAPASVEKPDDSAPERPERTLFGFKDQPDSAAEPASKDAGPFFRNKEKVLITCSRRIIYRYRHLMQNVVSLLPHAKKDSKVESKQSKCSALNELVELRSCSSCLFFECRKQKDLYLWMVKSPAGPXSEISINAVHTMEEXKLTGNI

SEQ ID NO: 29135 - protein, 492 aa, Arabidopsis thaliana
MLLRTMAATSPRPPPSTSLTSQQPPSPPSQLPLRTMPGSYGWPLVGPLSDRLDYFWFQGPDKFFRTRAEKYKSTVFRTNIPPTFPFFGNVNPNIVAVLDVKSFSHLFDMDLVDKRDVLIGDFRPSLGFYGGVRVGVYLDTTEPKHAKIKGFAMETLKRSSKVWLQELRSNLNIFWGTIESEISKNGAASYIFPLQRCIFSFLCASLAGVDASVSPDIAENGWKTINTWLALQVIPTAKLGVVPQPLEEILLHTWPYPSLLIAGNYKKLYNFIDENAGDCLRLGQEEFGLTRDEAIQNLLFVLGFNAYGGFSVFLPSLIGRITGDNSGLQERIRTEVRRVCGSGSDLNFKTVNEMELVKSVVYETLRFSPPVPLQFARARKDFQISSHDAVFEVKKGELLCGYQPLVMRDANVFDEPEEFKPDRYVGETGSELLNYLYWSNGPQTGTPSASNKQCAAKDIVTLTASLLVADLFLRYDTITGDSGSIKAVVKAK

SEQ ID NO: 29136 - protein, 1009 aa, Xanthomonas oryzae pv. oryzae KACC10331
MGRTRASCQLRCGSTIRLPLPRMPAMSQTPSSLRDLEHHSAFVERHIGPNDAEIAQMLEVVGHASLDALTDAIVPGNIKSPAPLALPEALTEEEALVKIRAIADKNTVYRNFIGQGYYGTHTPKVILRNILENPAWYTAYTPYQAEISQGRMEALINFQTLCADLTGMQIANASLLDEATAAAEAMTLAKRSAKSRSDIFFVHDAVHPQTLELLRTRAEPLDIMLRVGTPEEALQAECFGVLLQYPDSFGHIGDHAALAEAVHAQGGLVAVATDLLALTLIAAPGQWGADIVVGNSQRFGVPFGFGGPHAAFMACRDAYKRSMPGRLIGVSIDAAGNPAYRLTLQTREQHIRREKATSNICTAQVLLAVMASMYAVYHGPDGLTRIARRTHRLAAILAAALRGAGVTVGEHFFDTLHVKAIDADAIHARARAAGINLRAIDSEAVGISLDETTTRADVVALAQLFGAMADVDALDAATADALPQGLLRSSAFLTHPVFNTHHSEHELLRYMRSLADKDLAMDRTMIPLGSCTMKLNATAEMIPVTWPEFGAIHPLAPAEQSAGYAQLIDELEAMLVECTGYDAVSLQPNSGAQGEYAGLLAIRAYHRSRGEAHRDICLIPESAHGTNPASAQMCGMTVVVTKCDANGNVDVDDIRAKAEKYSDRLAALMITYPSTHGVFEEDVVAICEAVHAHGGQVYTDGANMNALVGVAKPGKWGSDVSHLNLHKTFCIPHGGGGPGVGPCAVKSHLAPFLPRAGLHAGEGQTAAIHGGGFNSGSGSGHSSRIGGMVSAAAYGSASILPISWMYVTMMGSAGLRKATQVALLNANYIAKRLAPHYKTLYTGRNGLVAHECILDVRPLEKTSGIGAEDIAKRLIDFGFHAPTLSFPVAGTLMVEPTESESQHELDRFIDAMIQIREEIRAIEDGRLDREDNPLKHAPHTATQVSASEWTHAYPRELAAFPLPSLKQQKYWPPVARVDNVYGDKNVMCACIPVDAYKIPVDAYKEDAEA

SEQ ID NO: 29137 - protein, 462 aa, Arabidopsis thaliana
MEGENNMEKGLLLAKKEDSANTTPLLIFSTFIIVSASFTFGAAIGYTADTMSSIMSDLDLSLAQFSLFGSLSTFGGMIGAIFSAKAASAFGHKMTLWVADLFCITGWLAISLAKDIIWLDMGRFLVGIGVGLISYVVPVYIAEITPKHVRGAFTFSNQLLQNCGVAVVYYFGNFLSWRTLAIIGSIPCWIQVIGLFFIPESPRWLAKKGRDKECEEVLQKLRGRKYDIVPEACEIKISVEASKKNSNINIRSLFEKRYAHQLTIGIGLMLLQQLCGTAGISSYGSTLFKLAGFPARIGMMVLSLIVVPKSLMGLILVDRWGRRPLLMTSALGLCLSCITLAVAFGVKDVPGIGKITPIFCFIGILSFTMMFAIGMGALPWIIMSEIFPMDIKVLAGSLVTIANWFTGWIANYAFNFMLVWSPSGTFIISAIICGATIVFTWCLVPETRRLTLEEIQLSFVNV

SEQ ID NO: 29138 - protein, 644 aa, Zea mays
MISARTAAASPASLWKRGGQSEGGGSCDGCRTYRNTLRRAAAAKVRALPSRAVEAVKMGSAAEVEQEEAEVAAAADGVVVEDHYGEDSATEELPIMPWAFSVASGYTLLRDPHHNKGLAFTEKERDAHHLRGLLPPAVVPQELQIKKIMHNLRQYQVPLQRYMAMMDLQERNERLFYKLLIDNVEELLPVVYTPTVGEACQKYGSIFRQPQGLYVSLRDKGKVLEVLRNWPHRNIQVICVTDGERILGLGDLGSQGMGIPVGKLALYTALGGVRPSACLPITIDVGTNNEKLLNDEFYIGLRQKRATGEEYHELMEEFMAAVKQIYGEKVLIQFEDFANHNAFNLLAKYSKSHLVFNDDIQGTASVVLAGLLAALKVVGGTLAEHTYLFLGAGEGGTGIAELIALEISKQTSAPIEECRKKIWLVDSKGLIVDSRKNSVQSFKKPWAHEHEGLTTLYDAVQCIKPTVLIGTSGVGRTFTKEVVEAMASFNERPIIFSLSNPTSHSECTAEEAYNWTQGRVIFASGSPFDPVEYDGKVFVPGQSNNAYIFPGFGLGLVISGAIRVHEDMLLAASEALAAQATQENFDKGSIFPPFTNIRKISARIARAVAAKAYELGLATRLPPPRDLVKYAQSCMYTPVYRNYR

SEQ ID NO: 29139 - protein, 402 aa, Sulfitobacter sp. EE-36
MKRVVITGAGTVNPLGLNVPDTLAAMRNGVCGIGPLDFRDVDRLSIKIGGQVHGFDGESQYNRQKIALYDRFTQFTLAAAAEAIRQSGLEFKGELSAKSGVVLGTAGGGVSTWDDNYRAVYAEGKNRVHPFVVPRLMNNAAASHVSMEHHLKGPSFTVSTACASSNHAMAQAFSMIRSGMAPAMVTGGSESMMCFGGVKAWEGLRVMSRDACRPFSANRNGMVQGEGAGIFVFEEYDHARARGADILCEVSGFAMSSDASDIVMPSKAGAARAIKGALDDARINPDEVGYINAHGTGTAANDKTECAAVADVFGTHADRLMISSTKSMHGHLIGGTGAVELLACIMALRDGVIAPTIGYEEPDPDCALDVVPNVARDARVTVALSNAFAFGGMNAVLALRAI

SEQ ID NO: 29140 - protein, 532 aa, Lactobacillus johnsonii NCC 533
MNKGHKISLFSAIMLALNSLIGSGWLFGSGSAAKIAGPAAILSWIIGAVIIIAIALTYVELGTMFPESGGMSKYAQYSHGPMLGFIAAWANWISLVTLVPMEAVAAVQYMSSWPWKWANWTHHFMQDGNITTPGLLLVFVFMIIFTLINFWSIKIMTHFTNLISVFKVLLPTITIIMLFASSFHPANFGHDVKTFMPYGSRAIFEAASGAGIIMSYDAFQTIINIGGELKNPRKNIIRGVLISMFATAAIYILLQVAFIGAVDPGMLAKNSWHGIDFASPFADIAILLGINWLVILLYMDAFVSPFGTGVAFVATASRALAAMTYTKHLPAWLGRLNRRYLVPRFAMIADLILAMILVSVFRNWNLLATVITCATLIAYLTGPVTTITLRKIAPDLERPYKPNYMRWFAPLTFVLTSLAIYWTMWPTTIQVILVILVGIPIYFYYEVKYQKKDFKSQFKHAAWLLGYLVFISIMSYCGSDGFGGQNWIKYPWDFLLIAIVSLIFYKVAIDTGLEKVDPAAIKVNEKIKLKKD

SEQ ID NO: 29141 - protein, 217 aa, Haemophilus somnus 2336
MDLTKFKEQIEFLDQKVAYFHIDIMDGHYVPNLTLSPFFVSQVKKLATKPLDCHLMVTNPENYIDDLAKAGCDMITLHVETISGQAFRLIEKIRYLEMKVGIIFNPETPIEKAKYYLSKADKVTILTVDPGFAGQSFIPEMLEKVAELKLFRETHQLNYEIEIDGSCNPKTYEMLIKAGADVLIVGSSGLFNNSDNIVEAWDMLEKEIERILSKGML

SEQ ID NO: 29142 - protein, 272 aa, Triticum aestivum
  misc_feature (186)..(186): Xaa can be any naturally occurring amino acid
MAVARRGAAPFPLAAARARGPRARLLFAPLSALPRRAAAPAMRVASDGNGGGLVPVRPGQEAEDAAATARGAVSDRAARKESERRTYLVAALMSSLGITSMDGVAVYYRFAWEMEGGEIPVTEMLGTLALSVGAAAGMEFWALCAHRSLWHASMWDMHQFHHLPREGPFQLHDVFAILNGVPGHGXLLGLGFYDWGLRPVLCSGPGLGTPPVANGQTLRPPRAWSTAPLPQGAPVEPSPLPGKSCGASVGRWTGSASGIRALPPPTTSSVAA

SEQ ID NO: 29143 - protein, 356 aa, Mycosphaerella graminicola
MSRTAQQQQQQGSRKISFNVSEQYDIQDVVGEGAYGVVCSALHKPSGQKVAIKKISPFDHSMFALRTLREMKLLRYFNHENIISILDIQKPKSYETFTEVYLIQELMETDMHRVIRTQELSDDHCQYFIYQTLRALKAMHSANVLHRDLKPSNLLLNANCDLKVCDFGLARSAASTEDNQGFMTEYVATRWYRAPEIMLTFKEYTKAIDVWSVGCILAEMLSGKPLFPGKDYHHQLTLILDVLGTPTMEDYYGIKSRRAREYIRSLPFKKKIPWKAMFPKTSDLALDLLEKLLAFNPTKRITVEEALKHPYLEPYHDPEDEPNAEPIPEEFFDFDKNKDNLSKEQLKRLIYEEIMR

SEQ ID NO: 29144 - protein, 362 aa, Oryza sativa (japonica cultivar-group)
MALRRLLQGSVLPRMAGRAAAAPFSTASGETVRATLFPGDGIGPEIAESVKQVFNVAGVPIEWEEHYVGTEVDPRTESFLTWESLESVRRNKVGLKGPMATPIGKGHRSLNLTLRKELGLYANVRPCNSLPGYKTRYDDVNLVTIRENTEGEYSGLEHQVVRGVVESLKIITRQASLRVAEYAFHYAKTNGRERVSAIHKANIMRKTDGLFLKCCREVAEKYPEIVYEEVIIDNCCMTLVKNPGLFDVLVMPNLYGDIISDLCAGLIGGLGLTPSCNIGEGGICLAEAVHGSAPDIAGKNLANPTALMLSAVMMLRHLQFNNQADRIHNAILQTISEGKFRTADLGGKASTSDFTKAVCDHI

SEQ ID NO: 29145 - protein, 259 aa, Zea mays
PDSPHRLGIRAFRAMGGGGGGGAEEEELTAQETALYDRQIRVWGVDAQKRLSKAHVLVCGVNGTTIEFCKNIVLAGVGSLSLMDDHIVTEDDLNSNFLIPHDESVYGGKSRAEVCCESLKDFNPMVRVAVAKGDPSLIDGTFIDRFDIIVLSRASLKTKLFINDNCRKRSKHIAFYSVDCKDSCGEIFVDLQNHSYLQKKPGGEPEQQELKYPSLQEAISVPWEDLSKKTTKLYYAMRVLGSYESSEGRDPGETSLSDL

SEQ ID NO: 29146 - protein, 484 aa, Lactobacillus johnsonii NCC 533
MKFSEMNLKPEILKAIKRSGFEEATPIQEKTIPLVLEGKDVIGQAQTGTGKTAAFGLPILQNLDKQHDSIQAIIIEPTRELAIQTQEELFRLGRDEKARVQVVYGGADIRRQIRALKQTPAILVGTPGRLLDHLKRGTIDISKVKTIVLDEADEMLDMGFIQDIESILKYASSKHQTLLFSATMPKPILRIGEKFMNDPEIVKIKGKELTANLIDQYFVRAKENEKFDILCRLIDVQNPDLAVIFGRTKRRVDELTRGLQARGYNAAGIHGDLSQAKRMSVLKRFRKGKLDILVATDVAARGLDISGVSHVYNYDIPQDPNSYVHRIGRTGRAGQNGMSVTFVTPNEIGYMRTIEQLTHKKMMPLKPPTDEEAFKGQLSAANKKVAELLDSDLSKYTEEASQLLDDYSAIDLVAALLKDLSKDADSVKVKITPEKPLPFKSKHGNNRNFKRNFKRGGDRNERYHRKPSARKGGRKHDFVIKKKD

SEQ ID NO: 29147 - protein, 250 aa, Haloarcula marismortui ATCC 43049
MWSLDHTMMRVEDLDASLDWYQTYFDYEEKGRWEADSFTNVFLGPEDVHDEGALLELTYNHDGRSYTMGDAWGHIAVRCDDVYDAYDDLMDAGVEDYRDPDSCGGSYAFVTDPDGHEIEIVERDHGTKWSLDHTMIRVEDAEQAIGWYVRKLNYELFRREEFDDFALYFLKPEDAPDEAMSVELTYNYDGRSYELGDAWGHLAVQTDDLHGAWETLMGRHAEDYRDPESCDDRYAFTKDPDGREIEIVTN

SEQ ID NO: 29148 - protein, 140 aa, Brassica napus
RASNVVYLRCAAELLEMTEEYGEGNLISQTETFFNQVVLKSWEDSVKALQSCDEVLEYADELNITKKCIESLAMRAFTDPNLFGWPVVEHGGGPMQSPGGSVLWNGISTGARPRQTNSDWWYEDASMLSFPLFQRLITVM

SEQ ID NO: 29149 - protein, 460 aa, Zea mays
EDVRATYTFGRELGRGQFGVTYLVTHSETGQRFACKSIATRKLVHRDDIEDVRREVQIMHHLTGHRNIVELRGAYEDRHSVNLVMELCEGGELFDRIIAKGHYTERAAASLCREIVAVVHSCHSMGVFHRDLKPENFLFLNNKEDSPLKATDFGLSVFFKHDVDTFKDLVGSAYYVAPEVLKRKYGAEADIWSAGVILYILLSGVPPFWAENEDGIFDAVLRGHIDFSSDPWPSISNGAKDLVKKMLRQDPKERLTAAEILNHPWIREDGEAPDKPLDITVIGRMKQFRAMNKLKKVALKVVAENLSDEEIMGLKEMFRSLDTDNSGTITLEELRSGLPKLGTKISESEIKQLMEAADVDGNGTIDYAEFISATMHLNRLEKEDHILKAFEYFDKDHSGYITVDELEEALKKYDMGDDKTIKEIIAEVDTDHDGRINYQEFVAMMRNNSPEIVPNRRRMF

SEQ ID NO: 29150 - protein, 218 aa, Oryza sativa
LGRHRQFNSQASPLAETQYPKGVVNVGTRKSPLALAQTQIVVDALKQRFPDHDFPIHSMTTTGDRDQNTALYNFGGKGLWTSQLEERLVNRELDIVVHSLKDMPTVLPEGCVLGCVTSREDPRDTLVIKKELQDKHGWKTLADLPAGSIIGTSSVRRIAQLVRRYPTLKFKDHRGNIHTRLRKLEEDPHLTGIILAAAGLQRMDLGHHITHSSSPKTE

SEQ ID NO: 29151 - protein, 605 aa, Methylococcus capsulatus str. Bath
MCGIAGLVLKGRNVQADRLHPMIERLAHRGPDGQGVFTEGGFGLAHTRLSIIDLSGGRQPILADDGRLAVVANGEIYNHVELREALEREGRRFATHSDSETILHAYALDPEGFAGRLHGMFAFALYDGVRRRLVLGRDRLGIKPLFYAALPDRLVFASEMKAILPLLPNAPTIDAGAFSQFLHTHCSTGEETLFSGIRRLGPGEILEADAELNLRKRRYWTPLGVRSRALDFAEAEAEFEGMFEQVMKEHVRSDVPYGLFLSGGNDSAILLAMLSRLQAQPVRTFSIGYVDAAMKDELGDAERIAQVFGSRHTSIRLRREDLFRRIPHTVWAADDLMRDYASFPTSALSEAAAKELKVVFTGEGGDEVFGGYRRYRQPRLAWLARNLLAPGTGGFRTRSEWWRKRSQRLFGPALAAERKHFRAPYLKAWSEAPAVWSHLQHCQYTDLVTDLPDSLLVKVDRMMMGFGLEGRVPFLDHRVVEFGLGLPDALKTDGKRPKVFLRRWAERHVPKEHLYTKKRGFTVPVREWLGGELLDRLEGKLSGNAAVREWFDTRHFPALFQAQRKKGNASREIFCLMQFAIWHRLFIDQPGLKPSPDEDPLDWIS

SEQ ID NO: 29152 - protein, 238 aa, Oryza sativa (japonica cultivar-group)
MEESRADGRNPNQLRPFSCTRNPLDRAHGSARWAQGDTIVLAAVYGPKPGTRKGENPEKASIEVVWKPMTGQIGKQEKEYEMTLKRTLQSICLLTVHPNTTTSVILQVVGNDGSLLPCAINACCAALVFAGIPLKHLAVAIGCGVLEDGEVILDTNKAEEQQLKSFAHLVFPNSRKSASSKEPNQKEEDSERGLITSITHGVMSEEDYFSCIERGLAASSRISDFMRTTLQKQAPGDV

SEQ ID NO: 29153 - protein, 656 aa, Burkholderia pseudomallei K96243
MCGITGFVGPVACAPQTARATLARMTDSLAHRGPDDTGLWIDHDAGVALGHRRLSIVDLSEHGHQPMLSACGRYAMTFNGEIYNFRALRSELEREHRAPEWRGHSDSEVLLAAFCAWGVDRALQKAVGMFALALWNRESRVLTLARDRIGEKPLYYGRIGGSFVFGSELKALRRFPGFDAHPIDRDALCLYLRHASVPAPYTIYEGIRKLPPGTYAQFEDLAEAPAPRRYWSLERAIAAGRANPFDGDANAAVAQLDHVLRDAIAEQSVADVPLGAFLSGGVDSSVIVALMQTQTAQPVQTFTIGFHEAGYDEAGYAKAVARHLGTSHTELYVKPADVLATVPRMPCVYDEPFADSSQIPTLLVSELTRRHVKVSLSGDGGDELFGGYTRYFLTPRLWGRLRRVPAAVRMRIAAALHALRPDHADQIASLVQGAWSASAQRDASPRVGDRLHKLANVMTADSRASLYRLLMSSVHHPERFTLAGHEPQTLIDTPGAWPPGLSFAEQAMAVDTLTYLPTDILTKVDRAAMAVSLETRMPFLDYRVVEFAWRLPEALRIPDGQDKWLLRKLLYRYVPRPLIDRPKQGFCAPVGAWLRGELSDWAAELLRPARLRDEGYLDAARVERLWRQHQSGRMNWQHPLWTVLMFQAWLERQRAE

SEQ ID NO: 29154 - protein, 101 aa, Arabidopsis thaliana
MKKRQMVIKQRSRNSNTSSSWTTTSSSSSSSEISNVRYVECQKNHAANIGGYAVDGCREFMAAGVEGTVDALRCAACGCHRNFHRKEVDTEVVCEYSPPNA

SEQ ID NO: 29155 - protein, 335 aa, Chlamydophila abortus S26/3
MKVVINGFGRIGRLVLRQFLKRNSSIEVVAVNDLVPGEALTYLFKYDSTHGRFPAEVSHENGCLVVDGRRIQLLAQSDVQKLPWKDLGVDIVIESTGLFTKKEDAEKHLASGAKRVLITAPAKGDVPTFVMGVNEHKFDPEKDLIISNASCTTNCLAPLAKVLLDSFGIEEGLMTTVHAATATQSVVDGPSKKDWRGGRGAFQNIIPASTGAAKAVALCLPELKNKLTGMAFRVPVADVSVVDLTVRLQKSTSYEEICKVVKEASEAHLSGILGYTDQEVVSSDFIGCEYSSIFDAGAGIALTDRFFKLVAWYDNEIGYATRIVDLLEYVAKNSK

SEQ ID NO: 29156 - protein, 430 aa, Debaryomyces hansenii CBS767
MKILVTSDDTGAVKEVVCSRGTDTSKQDAKQPKSIKNICSEPGASVRTRVLHMVNFKSTFLVASRLGGSVTIYDLNHEEYELVHTYQLAISNEDKPISLIELEEFDVVVVAFESGKVFVINLNNGKFDLDPIEIQLPGKKGISAFINNPHEAGVFACGGKENDARIIRLFEGEITKDVFEAENKQEFFQPDVIFTARNVKNDHLDLRPPIWISSILFFEEKPKDGYKFLTSTRYGQVRIYDTTHGKRPIQDYKVCEKPIVTLNFADSEEEVIVSDTHNLVAKYSLAQIDSKAFKTHSASAGEITKPVSKLLGKFSAGGNTGAIVGVNIFDDEIISTGGLDRYLRTYDISSREILAKVYLGVQISDVLMLDSEDEEEEEPESEMGDKRKKNIEKRRRKALEAEENESDEEELWNQLEENNKTKIEKKKRRI

SEQ ID NO: 29157 - protein, 529 aa, Xanthobacter autotrophicus Py2
MLDTAMKTQLKAYLERLVRPVEITAFVDDGAKSKEMLELLSDITDCSPKVTVAERRDGDAAGARVPSFALSSPGESIALTFAGLPMGHEFTSLVLALLQTGGYPPKLEAEVIEQIKALDGDFVFETYFSQSCQNCPDVVQALNLMAVLNPKIRHVAIDGALFQKEVDARQVMSVPTVYLNGEVFGQGRMGVEEIVAKLDTGAAARDAKRMAEMNRFDVLVVGGGPAGATAAIYAARKGIRTGVAAERFGGQVLDTMAIENFISVPYTEGPKLAAALEQHVREYEVEILNLQKAVKLVPGADIVEVEFANGASLRSKTVILATGARWRQMNVPGEDTYRNKGVAYCPHCDGPLFKGKRVAVIGGGNSGVEAAIDLAGIVAHVTLMEFDSALRADDVLQRKLKSLPNVTILTSAKTTEVLGDGQKVSGLTYENRNTGESVKVELEGIFVQIGLLPNTEWLKGTVELSPRGEIVVDAHGQTSVPGVFAAGDCTTVPYKQIVIALGEGAKASLSAFDHLIRSSAPKEEAVKAA

SEQ ID NO: 29158 - protein, 78 aa, Arabidopsis thaliana
CYPFSDKTPFLFKTGPHVYFVGNQNKYGTRLIKGSKGQLVRLFCIPKFCETGIGVAVNLKNLEGPPLSFSPQIIQSSH

SEQ ID NO: 29159 - protein, 333 aa, Listonella anguillarum
MSISNAVTKVEEFEDQEIMDSIEVDEELTTTKSQSDDDVQIEDAKEGFDASTKSLDATQMYLSEIGFSPLLTAQEEVLYARRSLRGDEAARKRMIESNLRLVVKISRRYGNRGLALLDLIEEGNLGLIRAVEKFDPERGFRFSTYATWWIRQTIERALMNQTRTIRLPIHVVKELNIYLRTARELSQKLDHEPTAEEIAFQLDKPVEDVSKMLRLNERISSVDTPIGGDGDKALLDIIPDTNNSDPEISTQDDDIRESLLNWLDELNPKQKEVLARRFGLLGYEPSTLEEVGREINLTRERVRQIQVEGLRRLREILVKQGLNMEALFNVEYD

SEQ ID NO: 29160 - protein, 526 aa, Chlamydophila pneumoniae TW-183
MERKRFIDCDSTKILQELALNPLDLTAPGVLSAERIKKFSLLGGGFTFSFATERLDDAILAALISLAEERGLHESMLAMQQGQVVNYIEGFPSEMRPALHTATRAWVTDSSFTGEAEDIAVRSRVEAQRLKDFLTKVRSQFTTIVQIGIGGSELGPKALYRALRAYCPTDKHVHFISNIDPDNGAEVLDTIDCAKALVVVVSKSGTTIETAVNEAFFADYFAKKGLSFKDHFIAVTCEGSPMDDTGKYLEVFHLWESIGGRFSSTSMVGGVVLGFAYGFEVFLQLLQGASAMDQIALQPNARENLPMLSALISIWNRNFLGYPTEAVIPYSSGLEFFPAHLQQCCMESNGKSIAQDGRRVGFSTSPVIWGEPGTNGQHSFFQCLHQGTDIIPVEFIGFEKSQKGEDISFQGTTSSQKLFANMIAQAIALACGSENTNPNKNFDGNRPSSVLVSSQLNPYSLGELLSYYENKIVFQGFCWGINSFDQEGVSLGKALANRVLELLEGADASNFPEAASLLTLFNIKFR

SEQ ID NO: 29161 - protein, 485 aa, Aspergillus nidulans FGSC A4
MSAKSIFEADGKAILNYHLTRAPVIKPTPLPPSNTHNPPPKLASLYFPDDLSVKDVLDQAEVTYPWLLTPGSKFVAKPDQLIKRRGKSGLLALNKTWAEAREWIEARATKEQQVETVVGVLRHFLVEPFVPHPQETEYYINIHSVREGDWILFTHEGGVDVGDVDAKAEKLLIPVNLKNYPSNEEIASALLSKVPKGIHNVLVDFISRLYAVYVDCQFTYLEINPLVVIPNADATSADVHFLDLAAKLDQTAEFECGTKWAVARSPANLGLAALPTSDKVNIDAGPPMEFPAPFGRELSKEEKFISDMDAKTGASLKLTVLNPNGRVWTLVAGGGASVVYADAIASAGFVSELANYGEYSGAPTETQTFNYARTILDLMLRSPIHPDGKVLFIGGGIANFTNVASTFKGVIRALREVAPVLNEHKVQIWVRRAGPNYQEGLKNIKAVGEELGLNMHVYGPEMHVSGIVPLALQGKQTDIKEFGTA

SEQ ID NO: 29162 - protein, 110 aa, Neisseria meningitidis MC58
MSSELIVHTSDAAFEKDVLNADIPVLLDFWAPWCGPCKMIAPILDDIAAEFEGRLKVVKINIDDNEATPSRFGVRGIPTLMVFKNGEVVATKVGALAKGQLTAFVEASIA

SEQ ID NO: 29163 - protein, 197 aa, Adiantum capillus-veneris
ARIKVIGVGGGGSNAVNRMLESDMHGVEFWIVNTDLQALKMSTLPVDNRLQIGEQLTRGLGAGGNPDIGMSAAEESKAIVEEAVLGADMVFVTAGMGGGTGSGAAPVIAGVAKSLGILTVGIVTTPFSFEGRRRSLQAQEGIASLRYNVDTLITIPNDKLLTAVSQSTPVTEAFQLADDILRQGVKGISDIITVPGL

SEQ ID NO: 29164 - protein, 583 aa, Magnaporthe grisea 70-15
MCGIFACHAHPDVQKFKPTALRLAKAIRHRGPDWSGSVTCNQTILCHERLSIVGVESGAQPLTNEDESIILAVNGEIYNHRLVRKSLKTPYHFKTTSDCEVIIPLYMEHGLDAPKYLDGMFSFVLYDKKQNRTIAARDPIGVTTFYQGWSSSEPGAVYFGSELKCLYQVCDKIEAFPPGHIYDSLTGERTRYFQPTWWDPKRVPETPLDLTKLREALEKSVRKRLMAEVPYGVLLSGGLDSSLVASIAQRETKRLKKLAIEAGLEDLPAEPTGNHDQGEGLVGIDDENKLSTMTYLPQLNSFSIGLPGSPDNKAALEVAKFLGTKHHVMTFTIEDGLNALSDVIYHLESYDVTTIRASTPMYLLSRKIKAMGIKMVLSGEGSDEAFGGYLYFHNAPDKDAFHDETVRRVKNLHLSDCLRANKSTSAWGLEARVPFLDKEFLELAMNIDPKEKMITKERIEKYIVRKAFDTSDDPNAEPYLPDNILWRQKEQFSDGVGYGWIDALKDNAEIQVTDEMMKNPKPEWGDDIPDTKEAYWYRCMFDEHFPPHCASTVERWTPTWSKQTDPSGRAIAVHAAKYDHISE

SEQ ID NO: 29165 - protein, 104 aa, Festuca arundinacea
KADLLDYDAIRRAVDGCHGVFHTASPVTDDPERMVEPAVRGTQYVIDAAAEAGTVRRMVFTSSIGAVTMDPNRGLEVVVDESCWSDLDFCKKTRNWYCYGKAVA

SEQ ID NO: 29166 - protein, 400 aa, Vibrio angustum S14
MLSQKTIDIVKTTAPVIAEAGPMVTQHFYQRMFSHNPELKDVFNMSHQKNGANNEPSSQQEALFNAICAYANNIENLAVLLPAVEKIAHKHTSFMITAEQYNIVGSHLIATIDELLAPGQDVLDAWAEAYGLLANIFINREEEIYQENANKVGGWRGTREFVVTNKQQDSEFITSFTFKPTDGGKVASYKPGQYLGIYLNADELENQEIRQYSLSSAPQDDQYRISVKRESHGKVSNYLHNNINIGDKVMLAAPAGDFFLDVEANTPVTLLSAGVGLTPTLSMLESLTEHQAPVNWLHATENGAHHAYKKQVKALAQQHNHIQDITWYNAPLDSDLPAEDYDYQGLMDLSTIAPQLTDENMHFYFCGPVAFMQYIAKQLLALGVSEDRIHYECFGPHKVL

SEQ ID NO: 29167 - protein, 383 aa, Triticum aestivum
MVDLQAGALVISVVAAEVEKSKKAAQATKIAPAAAKRKEEPSDSSDSDESDEEPPQKKQKDAAKVAPKSAKKDSSSDDDSSDESSDDEPKKEVTTATKSQKEEPNTPASNKGQATGSKTLWMGKLSFNIEYDQVKQFFAQIGEVVDVRLATHEDGHPKGFGHVEFATAEDAQKALDSLNGGDLMGRPVRLDMAAERGASAPRTRDGGSFGKPSGGPSLSVFVKGFDSSQQEDAIRSSLQEHFSKCGEITRVSVPMDYENGASKGIAYMDFTDESSFSKALALSGSDLGGCNLYVAEAKPKGQFGGVGGRSGGRDGGRSGGGRFGRSGGRDGGGRFGRSGGRDGGGRFGRSGGRDGGRGGGRGFQSRQSAGTASAGKKTTFGDD

SEQ ID NO: 29168 - protein, 542 aa, Vitis vinifera
MQTSTYAAKGSIGLELQNRRVFPRFGEFRKQSSCVKNLRVTNNTTSSGLRIGSVVMGAEFGRPRTRIEAVFRPRSVKARASGGDIEDVDVTAPQGKSSGTVLPFVGVACLGAILFGYHLGVVNGALEYLSKDLGIAENAVLQGWVVSTLLAGATLGSFTGGALADKFGRTRTFQLDAIPLAVGAFLCATAQSVQTMIIGRLLAGIGIGISSALVPLYISEISPTEIRGALGSVNQLFICIGILAALVAGLPLARNPLWWRTMFGVAVVPSILLALGMAFSPESPRWLFQQGKISEAEKSIKTLNGKERVAEVMNDLREGLQGSSEQEAGWFDLFSGRYWKVVSVGAALFLFQQLAGINAVVYYSTSVFRSAGIASDVAASALVGASNVFGTAIASSLMDRQGRKSLLITSFAGMAASMMLLSFSFTWSALAPYSGTLAVLGTVLYVLSFSLGAGPVPALLLPEIFASRIRAKAVALSLGMHWISNFVIGLYFLSVVNKFGISTVYLGFSAVCLLAVLYIAGNVVETKGRSLEEIERALNPAT

SEQ ID NO: 29169 - protein, 130 aa, Triticum aestivum
MATSMITSPLVAPARAKGLPSISRRGSSFAIVCSGGKKIKTDKPYGIGGGMSVDIDASGRKSTGKGVYQFVDKYGANVDGYSPIYSPEEWSPTGDTYVGGTTGLLIWAVTLAGLLGGGALLGYNTSGLAG

SEQ ID NO: 29170 - protein, 511 aa, Gossypium hirsutum
MMAVLFVYLGFMVFGIIVLRFLYRFIDNNGLPRNWPFVGMIPTLLLNIHRPHDKVAQVLRRSNGTFFYRGLWFTNTSFLATSDPENVRYILSSNSSVYLKGPEWLKQFDIFGEALFNSDGEAWKCHRRVFHAFLNHPQYRQSLSKVLHQRIEEALVKVLEYVSGREMVVNLQDLLAGHAFDIGCITGVGFDPGLLSIEFPENRFQKAMSDTLEAAFYRYVVPDSLWKLQSWPQIGKGKKRSDAWKALDDLLTQFISTQRHKSTKSVASSGSNEEHDFNFLNCYLTGHEITGPTPKESLIRDNLIHFLFASDGTYSLTLTWFFYLISKAPVVENKIREEIKRHLSMKQVEGSLQIPSNYDELSKLTYLHAALCETLRLYPPIPFDFRTCTKQEYLPSGHRVDQNTRIIIGIHAMGRMESLWGEDCYAFKPERWIGEDGKIKRESPTKFSAFLAGPRICPGKEVSFLLMKATATAIIHNYNVHVVEGQNIGPKNSVVYQMKKGLMVRIKKRWS

SEQ ID NO: 29171 - protein, 438 aa, Treponema denticola ATCC 35405
MKKTDFSISTLGECKIQSPIMLSETHGDLIANYVTDNEFIRYNLDASLGETGEPLTHADIIEKAGPRQKIYFSPNYVHAAIATCGGLCPGINDVIRAIVRCLWTRYGVRRISGIKFGYKGFISEYGFSPVPLTPEAVNGIHKTGGSFLGTSRGGGTRVTEIVDGIEQMNINMVFFIGGDGTQKGALEVSREIERRKLKISVIGIPKTIDNDLSFIQKSFGFDTAIAKATESVAAANMEASSQINGIGLVKLMGRESGFIATHTAIACHEAHFVLIPEVRFELGGENGFLKLLEKKLIENGYALIVAAEGAGQHLMNIEEETDASGNKKLADIGLFLKKEITEYFDKIGMHINLKYIDPSYQIRSSIAAPIDSVYCERLGNNAVHAAMAGKTRTLIGLVNNKFVHLPIEQVVSERKYVNPESSLWRDALDATGQPTTMI

SEQ ID NO: 29172 - protein, 523 aa, Candida maltosa
MAIEQIIEEVLPYLTKWYTILFGAAVTYFLSIALRNKFYEYKLKCENPVYFEDAGLFGIPALIDIIKVRKAGQLADYTDTTFDKYPNLSSYMTVAGVLKIVFTVDPENIKAVLATQFNDFALGARHAHFDPLLGDGIFTLDGEGWKLSRAMLRPQFAREQIAHVKALEPHVQILAKQIKLNKGKTFDLQELFFRFTVDTATEFLFGESVHSLYDEKLGIPAPNDIPGRENFAEAFNTSQHYLATRTYSQIFYWLTNPKEFRDCNAKVHKLAQYFVNTALNATEKEVEEKSKGGYVFLYELVKQTRDPKVLQDQLLNIMVAGRDTTAGLLSFAMFELARNPKIWNKLREEVEVNFGLGDEARVDEISFETLKKCEYLKAVLNETLRMYPSVPINFRTATRDTTLPRGGGKDGNSPIFVPKGSSVVYSVYKTHRLKQFYGEDAYEFRPERWFEPSTRKLGWAYLPFNGGPRICLGQQFALTEASYVIARLAQMFEHLESKDETYPPNKCIHLTMNHNEGVFISAK

SEQ ID NO: 29173 - protein, 461 aa, Photobacterium sp. SKA34
MKHPNVLQITLVVALGGLLFGYDTAVISGATESLQTFFNLNPAELGFAAASALIGCVIGAIAAGYTSTKYGRRGALLIAALLFFISALGSAIPDQYWTFIFYRIIGGIGVGIASMVSPMYIAEIAPPQKRGALVSCNQFAIIFGMLVVYFVNYGIALMGSESWLNEMGWRYMFGSEMIPAGLFFCLLFSVPETPRWLAMRGRDEQAKELLSKISKGKDFDNQWKEIKDSLVEVGTASVTSRKILPILVIGIMLSVLQQVTGINVFLYYAPVILKSFSSSSTDLALLQTILVGAVNLTFTVIAIITVDKYGRKPLMMLGSGLMAVSMIAIGTAAYLNAIGGYLLFFVLTYIAAFALSLGPVTWVLLSEIFPNNVRSKALSIAVFAQWVANYAVSQTFPMMNDQNSWLFKEFNGGFPFWFYGVMGLVTIYFVHRFVPETKGKSLEELEELWEKPDELETVTHN

SEQ ID NO: 29174 - protein, 680 aa, Brassica napus
MSNSCSGGGGCSIVWFRRDLRVEDNPALAAAVRAGPVIAVFVWAPEEEGHYQPGRVSRWWLKNSLAQLDSSLRSLGTCLITKRSTDSVASLLEVVKSTGASQIFFNHLYDPLSLVRDHRAKDALTAEGIAVKSFNADLLYEPWEVTDELGRPFSMFAAFWERCLSMPYDPESPLLPPKKIISGDVSKCVADTLIFEDESEKGSNALLARAWSPGWSNADKALTTFINGPLIEYSKNRRKADSATTSFLSPHLHFGEVSVRKVFHLLRIKQVAWANEGNQAGEESVNLFLKSIGLREYSRYISFNHPYSHERPLLGHLKFFPWAVDENYFKAWRQGRTGYPLVDAGMRELWATGWLHDRIRVVVSSFFVKVLQLPWRWGMKYFWDTLLDADLESDALGWQYITGTLPDSREFDRIDNPQFEGYKFDPNGEYVRRWLPELSRLPTEWIHHPWNAPESVLQAAGIELGSNYPRPIVGLDEAKARLHEALSQMWQLEAASRAAIENGSEEGLGDSTEFVEAPIEFPRDITMEETEPTRLNPVRRYEDQMVPSITTSLIRPEEDQESSLSLRNSGGDSRAEVPRNMVNTNQARQQEARADPVSNQVTAMIPEFNIRIVAENTEESTAESSSSGRRERDGGIVPEWSGYSEQFASEENGIGGGSTTSSYLQNHHEIVNWRRLSQTG

SEQ ID NO: 29175 - protein, 554 aa, Pseudomonas aeruginosa PAO1
MKHHLTPLDATQLDSWRALAAHRQELQDFRMRQAFIDDPERFKRFSFSACGLFLDFSKNLIRQDTIDLLVKLAEEARLSDAIRAMFDGEAINASERRPVLHTALRRPIGDKVLVDGVDVMPEVHRVLHQMTELVGYVHNGLWRGYTEKPITDVVNIGIGGSFLGPQLVSEALLPFAQKGVRCHYLANIDGSEFHELASRLNAETTLFIVSSKSFGTLETLKNAQAARAWYLAQGGTEEELYRHFIAVSSNKEAAIAFGIREENIFPMWDWVGGRYSLWSAIGLPIAMSIGISNFKELLSGAYNMDQHFQTAPFERNIPVLLGLLGVWYGDFWGANSHAILPYDYYLRNITDHLQQLDMESNGKSVRQDGTPVTSGTGPVIWGGVGCNGQHAYHQLLHQGTQLIPADFIVPVSSYNPVADHHQWLYANCLSQSQALMLGKSREEAEAELRAKGLPEAEVQRLAPHKVIPGNRPSNTLVVERISARRLGALIAMYEHKVYVQSILWGINAFDQWGVELGKELGKGVYSRLVGSEETPAEDASTQGLIDFFRGRHRG

SEQ ID NO: 29176 - protein, 109 aa, Chloroflexus aurantiacus
  misc_feature (77)..(77): Xaa can be any naturally occurring amino acid
AKPIEVHDSPFAEKVLQSKTPVVVDFWAPWCGPCRVIAPILDKLAGEYAGRLTIAKVNTDDNVQYASQLGLKGLPTXVIFKDGREVGRLVGARPEAMYREIFDKVLAMA

SEQ ID NO: 29177 - protein, 967 aa, Glycine max
  misc_feature (929)..(929): Xaa can be any naturally occurring amino acid
MATRNLEKMASIDAQLRQLAPAKVSEDDKLIEYDALLLDRFLDILQGFTWENLKETVQEVYELSAEYEGKHDPKKLEELGNLITSLDAGDSILVAKSFSHMLNLANLAEEVQISRRRRNKLKKGDFADENNATTESDIEETLKKLVFDLKKSPQEVFDALKNQTVDLVLTAHPTQSIRRSLLQKHGRIRNCLSQLYAKDITPDDKQELDEALQREIQAAFRTDEIRRTPPTPQDEMRAGMSYFHETIWNGVPRFLRRVDTALNNIGIKERVPYNAPLIQFSSWMGGDRDGNPRVTPEVTRDVCLLARMMAANLYYSQIEDLMFELSMWRCNDELRVRAEELHRSSKKDEVAKHYIEFWKKVPPNEPYRVVLGEVRDRLYQTRERSRHLLSNGYSDIPEEATFTNVEEFLESLELCYRSLCACGDRAIADGSLLDFMRQVSTFGLSLVRLDIRQESDRHTDVLDAITKHLEIGSYQEWSEEKRQEWLLSELSGKRPLFGPDLPQTEEIRDVLDTFHVIAELPPDNFGAYIISMATAPSDVLAVELLQRECHIKHPLRVVPLFEKLADLEAAPAALARLFSIDWYRNRINGKQEVMIGYSDSGKDAGRFSAAWQLYKAQEELINVAKKFGVKLTMFHGRGGTVGRGGGPTHLAILSQPPDTIHGSLRVTVQGEVIEQSFGEQHLCFRTLQRFTAATLEHGMHPPISPKPEWRALMDQMAVIATEEYRSIVFKEPRFVEYFRLATPELEYGRMNIGSRPAKRRPSGGIETLRAIPWIFAWTQTRFHLPVWLGFGAAFKKVIEENVKNLNMLQEMYNQWPFFRVTLDLVEMVFAKGDPKIAALNDRLLVSKDLWPFGDQLRNKYEETRKLLLQVAGHKEILEGDPYLKQRLRLRHAPITTLNIVQAYTLKRIRDPNYNVKVRPRISKESAEAXKSADELVKLNPTSEYAPGLEDTLILTMKGIAAGMQNTG

SEQ ID NO: 29178 - protein, 669 aa, Schizosaccharomyces pombe
MTVLAPLRRLHTRAAFSSYGREIALQKRFLNLNSCSAVRRYGTGFSNNLRIKKLKNAFGVVRANSTKSTSTVTTASPIKYDSSFVGKTGGEIFHDMMLKHNVKHVFGYPGGAILPVFDAIYRSPHFEFILPRHEQAAGHAAQAYSRVTKKPGVVLVTSGPGATNVITPIADALADGTPLVVFSGQVATSAIGSDAFQEADMVGISRSCTKWNVMVKDVADLPRRIDEAFEIATSGRPGPVLVDLPKDVTASVLKEPIPILSSVPSMNRRMKEVLEEGSKNVTAKIDRVANLLKLAKKPVIFCGHGVLANPECPTLLRKFSERLQIPVTTSLLGLGAVDERSDLSLHMLGMHGSGYANMAMQEADLILALGVRFDDRVTGNVSLFAPQARLAAAEERGGIIHFDISPKNIGKVVQPTEAIEGDVYESLKLLDSATKNIKIPSRFDWLSQIQTWKERFPFTFTRSAPGELVKPQEVIQELDKQTSDIKDKVTITTGVGAHQMWAATFYRWTKPSSLVTSGGLGTMGFGLPAAIGASVAAPKDIVIDIDGDASFSMTGMELATVRQFDIPVKILILNNEEQGMVTQWQNLFYEKRYSHTHQKNPNFVKLADAMGIKALRVEKREDLAKKMKEFLSTKGPVLMEVLVAQKEHVYPFVPGGKALHQFILHESLS

SEQ ID NO: 29179 - protein, 1182 aa, Cryptococcus neoformans var. grubii
MFVTRPPSSSVDHRGSLLDGHTNHTNTPGSSRDDVPSSDSTSTAFHKFKNSSRFSPHYLNIPPGLAFKSYLEKWGPEQVIGFLAIHGCEHHSGIFIKNSIDGKLLLDLDMGILTSLGITKVGERIRLMAGIKCLRQRVAHEAEKHNIPSAHLCNGSLEMDRVKVIIHPKLSASLYVHRHGPFDSGPITARRCPLTPSSSADPEGDPSPMQRSQEVMKHSFITRSSRRQVIPPLPPGQIHNHGIDNSPMPSLRHIPLRSGVSYSDIDVKGMPPLVTQSTNSVFNHTFAVTGSHDTTSCLGGHLRRPDYFRSTNDTFQTCTKRGDNTISELPQRNQESSPSMWKQSGVICEDKAMRNGSLFAPTSHKPFAISITGDNVMEYPHNLPIKNGLPLRSFQSPDKSADDDRLNINPSAPSLDDLRRQLVKFVNAEDGTTRTVNVMKTTSGVEVLERALRKFGKTGTGRALLLDDESHNGGKHEGPLCIDGWGVFAENLQGEEMGPMSEEDLLDICASLRNGAAMQRDALILRQTSKSQKRKDMRFYLGSMPVLPTPVNLPISFSSSHSGQFEQNSALQYTAQHQPLRSKNRSRASMMSIMSGLGVSHPDIKQPTHDSLQSPASVTMPSSKKKSMYNFFGHRPPSELISSHLTDYFPSAKKRDVAKARGSMLRLNIAHSAERNPRSVENLGMIEADDVPFSSTEQSLTEQRDHYFDSSTCQPADTSSPGHVDHNITDPAGNSEGNYRLPYDQKVLPTPITQELHSANSVNPILRTYPPNLPSTYLSARLTDLHRDSFLSQLQPLQHSSSLSSAQPFSSHRRTVDEITAEMQHRQTSLSCDRPTSTIDSDISGPPCNSEISLDHTSEASGISESSSEYCDDHSSVSSEDSEDNSAAHTRAFTTKRNIKWIKGALIGAGSFGSVFLGMDAQSGLLMAVKQVELPRGIAKMEARRRDMLSALEREIELLKDLQHDNIVQYLDSSMDANHLNIFLEYVPGGSVAALLNNYGAFEEALAGNFVRQILTGLNYLHERDIVHRDIKGANILVDNKGGIKISDFGISKKVENSLLNGLHPNRPSLQGSVFWMAPEVVKQTSYTSKADIWSVGCLVVEMLTGTHPWARLTQMQAIFQIGSMGQPEIPSDISVHAADFLSRAFALDYRMRPSAASLLKHAFMVHDGNGGNDEPIQNTYA

SEQ ID NO: 29180 - protein, 290 aa, Saccharophagus degradans 2-40
MSVLINKDTKVLCQGFTGSQGTFHSQQAIEYGTQMVGGVTPGKGGQTHLGLPVFNTMAEAVEATGADASVIYVPAPFCKDSILEAAHSGVKLVVCITEGIPTLDMLEAKVKCDELGVRLIGPNCPGVITPGECKIGIMPGHIHLPGKVGIVSRSGTLTYEAVKQTTDFGFGQSTCVGIGGDPIPGSNFIDILEMFEKDEKTEAIVMIGEIGGTAEEEAAAYIKANVTKPVVSYIAGVTAPAGKRMGHAGAIISGGKGTADEKFAALEDAGVKTVRSLAEIGNALKEITGW

SEQ ID NO: 29181 - protein, 238 aa, Triticum aestivum
  misc_feature (181)..(181): Xaa can be any naturally occurring amino acid
MTSVWKTKVLPGLNKIFDKDGKKAAAAEFLKSFNKEEIDKEIEDKKTELEPKVVETIEASPPEIKGLIKDKKTSKIRKNSVAVTKFLDDLAKIDFPGAKLVSDAVAKSGTTPLSPAIVFILDKVAPFVPAPKEEPKVEPEVAAAAPAEETTTREVAVEEEKKEEGPAPAEVVQEKKKEKPXEAAGPAAEEPKNKGSGPAAPHSHKHPRPHLGLANCSQMKKHLSRTAHLGRRSPSSGH

SEQ ID NO: 29182 - protein, 250 aa, Salmonella enterica subsp. enterica serovar Paratyphi A str.
MAVTKLVLVRHGESQWNKENRFTGWYDVDLSEKGVSEAKAAGKLLKEEGFSFDFAYTSVLKRAIHTLWNVLDELDQAWLPVEKSWKLNERHYGALQGLNKAETAEKYGDEQVKQWRRGFAVTPPELTKDDERYPGHDPRYAKLSEKELPLTESLALTIDRVIPYWTDTILPRMKSGERVIIAAHGNSLRALVKYLDNMSEDEILELNIPTGVPLVYEFDENFKPLKHYYLGNADEIAAKAAAVANQGKAK

SEQ ID NO: 29183 - protein, 554 aa, Candida albicans SC5314
MGSSTNNTQSKATPSVLENEVNSSKSSVVSSTSSAKGLLRETTNHGTMETSSVQISESESRPSKMVLVLTLASSISGFMFGYDTGYISSALVQIGTDLSNKILTSGEKEFITSATSLGALLGAVVGGVLANLIGRRRVLLGSNIIFVVGTIIQLAARTVWTMIAGRFVLGWGVGIASLIAPLMISELAPAKYRGRLIVTNVIFITGGQLIAYFINWGLTRVSHGWRVSVGLCMVPPVLQFVLFWFLPDTPRFYVMNGNFEKARQVLRKVHVDPSDEFVNATIDEMIASDSTVPGNGPLQKAWKSIKIIHTTPGNFRALILACGLQGIQQFTGFNSLMYFSATIFETIGFHNATAVSIIIAATNFVFTGIAICIIDKVGRRRILLVGMPCMCISLIVCAVAFHYLNVDFSTGTVVSRGINGWGIVVIIGMILYVASYAIGIGNAAWVGVEMFSDVNVRSIGAMYAACTNWAGSLVIATTFLTMLENITPTGTFSFFAGLCFIAFFFVYFLLPDTAGLELEETTDFLSNGFNVKQAAQLSKERKKHSKFAKSKPTV

SEQ ID NO: 29184 - protein, 655 aa, Aspergillus nidulans FGSC A4
MPAAPLVSTANGPNANDNITRFEPPSRVRSPFADALFHNKTRCFVYGMQPRAVQGMLDFDFICKRSTPSVAGIIYTFGGQFVSKMYWGTSETLLPVYQDTAKAMAKHPDVDTVVNFASSRSVYSSTMELMQYPQIKCIAIIAEGVPERRAREILVTAKEKGITIIGPATVGGIKPGAFKIGNTGGMMDNIVASKLYRKGSVGYVSKSGGMSNELNNIISQTTDGVYEGVAIGGDRYPGTTFIDHLLRYQAEPECKILVLLGEVGGVEEYRVIEAVKNGVITKPIVAWAIGTCASMFKTEVQFGHAGASANSDLETAVAKNKAMREAGIYVPDTFEDMPAVLKKVYEEQVQNGVIKPQPEPVPPKIPIDYSWAQELGLIRKPAAFISTISDDRGQELLYAGMPISDVFKEDIGIGGVMSLLWFRRRLPSYATKFLEMVLMLTADHGPAVSGAMNTIITTRAGKDLISALVSGLLTIGSRFGGALDGAAEEFTKAFDKGMSPRDFVDTMRKENKLIPGIGHRIKSRNNPDLRVELVKEYVKKHFPSTKLLDYAIAVETVTTSKKDNLILNVDGCIAVCFVDLMRNCGAFSAEESEDYMKMGVLNGLFVLGRSIGLIAHYLDQKRLRTGLYRHPWDDITYLLPALQKGGSEGRVEVNV

SEQ ID NO: 29185 - protein, 234 aa, Nitrosomonas europaea ATCC 19718
MNEIQEPIRLVLLRHGQSIWNQDRHFTGWGDIVLSPQGEQEALRAGHLLKQAGFTFDACFCSELQRASDTLAIVQSVMGLNHLSTYRTWRLNERHYGALEGMRPWAAIRKFGIWSTMKSQIRFDAAPPLLMPDDPRAPVNQPRYAAVDRTQLPLAESMQQTLERVRPLWQETILPEIRQGKRLLIVSHQNLLKTLVMQLEGLTGAQIMRLSITTGHPLCYELDHSLVPVKRYYL

SEQ ID NO: 29186 - protein, 217 aa, Ehrlichia canis str. Jake
MKNLSFFYSKKKVIDNISFRVKFGEIITILGPNGGGKTTLIRILVGIYKNYVGLVEYAKDFTIGYLPQHFSVNSLIPMTVEYFLNSSYTNRKRKLGVGDVLKDVNIEKILDRQMSEISYGELQLVLLARCLMLNPDLIILDEPVSCMDINAKNSFYKLINKLISIYNLSVIMTSHDLHFVMSNSYRVICINKSVYCEGSPSEIVKNEKFLKMFSSYA

SEQ ID NO: 29187 - protein, 487 aa, Chlamydomonas reinhardtii
MPLAELWRLTKLVPLACTVLLLSVRALAVDSGGLNDSADNSSRSLLQESGQASGTSQPYTYSSSDFVLLNGFLIFFMQIGFVSAESGQGRAKNVRNILLKNSVNIMLCAICWWAVGYAFAYGNSGGGFIGTSRFFSDGESFGSKPWFFTWTFCLSCVTIASGCLAERTHLFVYPVYTAVVSIAVHPVIAHWVWAPDSWLNSMTGSPCRFLDFAGGAVVHTVGGLTGLIGAMLCGPRLGRFEDGVGKDIPGHDVSSVSLGSLMLWFGWYGFNCGSTYIYMAQGGSEASAAVSRVALNMTLCASVAGMTSLVVSSIQTGTFDLAVCCNGLMAGLSASTSNVGFLTPWAACITGALAGLLYVGISRLLVRMGVDDPLDSSAIHCGSGILGVLVSGFLARPSYVMQMVGCNCGGVVYATNGGMQLGMQLLGLSCSMVWTAMWALLTFGILKKLQLLRVDQQTELAGIDNMEHGGPAYPEFLQRVQSTRPGY

SEQ ID NO: 29188 - protein, 632 aa, Physcomitrella patens
MESVCLRPQALSDSSQLASSRYLSLDTFFSQVYSPTSIHSRKVPCFRRLRSGVPASSFRHGRHLYPIVATAISSDSSQGNELKKTSRRRVKGRARVALVEAVEPDVSAEGLLQDSLSARLEHAYRIPSLEILKSDLEARFDSVSKEEELESDDGSIADGSVEEQSTPEADSVRKSVRNGRSKVGVNTDSNVEGGVKSSSVKSPKAVKKRSSRRQNVEGNRILKITKNSVTRQPRKVAVRTPSHLTETGHQVAEDQQVAADRGGKRRLSLRSRIAMKQNKLEASVVEKPGPTVDSWNMDPEDQLLWSQEAEELINKYTTSMDLAAPLWDKLDRGLLTAVEENRLAVFMKPMKKLEKLQKVLMKQLGRDPTDEEWAAAAGVDLLIMRRRLALGRAARTKLIQRNLRLVLSQAYKYHKDSMSLSIQDLCQEGVIGLMQAVDKFDPGKGYRFSTYGIYWIRNSILRAQTKSGHMLRSPHNVSTHRVNIQRAKVELFSELGRQPTNDEIRKHLGITADRFRDILRTNMRTSSLHEHDRITGREKVENLVSEEDALDTLAGGTSMVQYGLDDVLDSLRPKENLVLRQRFGLDGKGQRSLSEVGLILNLSREMVRRYELRGILKLQHPTRVEYLRNYLN

SEQ ID NO: 29189 - protein, 502 aa, uncultured archaeon GZfos23H7
MEKVKSEKKRETPIGRRQLAAVLVFALVVILALIPGVMAGDPTGAKTLEDDPGAPVDYVWVLICGFLVMFMQPGFAMLEAGVSRAKNTTNVLMKNLVDYSVGSLAFFAVGFALMMGTSAYLLVGTDGFFLAGEAYDVGTSLTWFFMLVFCATAATIVSGAIAERPKFSVYVIYSVVICAFIYPIYGHWLWGGGWLSSADFMTSLGGGYGALDFAGSGVVHAVGGYIALAGCLLLGPRIGRYTKEGKPIPIPGHSITFAVLGAFILWFGWFGFNPGSTLSAHELRISVIAVNTNLCAAAAAMTAMFITWKKFGKADVVMTVNGAVAGLVAITAACAWVAPWASVVIGIVAGFVVCYGYWFLERRGVDDVVGAIPVHGLNGTWGLLALGLFADGTYGNYATEAPFITGLLYGNAGFFGCQLISVVVNFAWAFGTGFLLFYILKHTLGIRVSPEEELAGLDISEHGVVTYPDFVYSEPARPTRLIRMSEAVIERENEPKTEEGEG

SEQ ID NO: 29190 - protein, 473 aa, Sulfitobacter sp. EE-36
MSDKSPILLWYRRDLRLSDHPALSAAANAGRPVIPVFIKDKSVNALGAAPKWRLGLGVGALADSLEGVSSRLILREGDALEALQALIKETGAGTVYWSRLYDPDSVQRDSKIKETLCNDGIEAKSFGGHVMFEPWTVETKAGDCYKVYTPFWNNVKTRDVEPPLSAPSDLPAPESWPDSDALDGWGLGAAMDRGADVVRRFVCLGEKAAQSRLGAFMAHGVADYKLTRDIPGTDGTSNLSENLSLGEISPHQCWHAAQRALHDGKQGAETFLKELVWREFAYHLMHHTPRMLTDNWREEWDAFPWNEDERRAEVKAWKQGRTGEPFVDAAMRELYVTGRMHNRGRMIVASYLTKHLMCHWRIGQKWFEHCLIDWDPASNAMGWQWAAGSGPDASPYFRVFNPETQLDKFDKNRDYASRWIAEGRANPHKDALAFFDAIPRSWPLSADDDYPEKIIALDEGRERALETYKGRNF

SEQ ID NO: 29191 - protein, 112 aa, uncultured archaeon GZfos23H7
MKKIEAIIRPEKLDEVKNALEKEKLVSMNVTEIRGRGRQKGAKLMWRGDEYLMEMVPKMKIDMVVRDEDAEKVVKIIRETAYTGNIGDGKIFVLPVEEAIRVRTGERGEEAL

SEQ ID NO: 29192 - protein, 69 aa, Zea mays
MADWGPVVIATVLFVLLTPGLLFQLPAHGRIVGFGTMHTSGVAILVHAVLYFALITIFLIAIGVHIYAG

SEQ ID NO: 29193 - protein, 448 aa, Listeria innocua
MAKHRYLPMTEQDEKEMLEVIGVKSIDDLFQDIPEKIRFKRDYDLKPAKSEPALLRELSKLASKNANTSEYASFLGAGVYSHYIPTVVDHVISRSEFYTAYTPYQPEISQGELQAIFEFQTMIAELTGMDLANSSMYDGGTALAEAAMLASGHTKRKKILISGAVHPESINVLKTYATGQHIEVEVIPEVDGKTDIDVLKKALSDDIAGFVVQYPNFYGQVEPLAELEKLVHENNSLLLVSSNPLSLGLLTPPGEFGADIVVGDSQVFGIPESFGGPHCGFFAVTNKLMRKVPGRLVGETVDENGKRGYVLTLQAREQHIRRDKATSNICSNQALNALASSVAMATLGKTGLVEMAKQNLDKSHYAKQKFRENGFEVLFSDGFFNEFVVKLSKPIKEVNESLLDEGIIGGYDLGFYDAKYEQHMLVAVTEMRTKEEIDAFVASLEGVK

SEQ ID NO: 29194 - protein, 238 aa, Oryza sativa (japonica cultivar-group)
MPSRTAPFISRLRLLRTAAALSPFSSSAPPRHSPRILRAIPVGAPHPPRVSAAVSPLVRPVAAGFALFSMATAASSAASVHDFTVKDASGKDVDLSTFKGKVLLIVNVASQCGLTNSNYTELSQLYEKYKDQGFEILAFPCNQFGGQEPGTNEEIVQFACTRFKAEYPIFDKVDVNGDNTAPIYKFLKSSKGGLFGDNIKWNFSKFLVDKEGRVVERYAPTTSPLSMEKDIKKLLGSS

SEQ ID NO: 29195 - protein, 507 aa, Novosphingobium aromaticivorans DSM 12444
MTVAEAETYWTALAGLPRPTLKELFSDAGRLDRYAATLDLPGGPIRFDWSKTHLSAEVEAVFAALASAMDFEGRRAALIEGAKINNTEGRAAEHTAQRGIGNEASVEEAEALHARMRMLVDAIHAGALGEVRSLIHIGIGGSALGPALAIDALTRDGAKVAVHVVSNIDGCALEAAMKACDPATTMIAVASKTFTTTETMTNAASALEWLRENGVADPYGQVVALTAAPEKAVEWGVDETRVLPFSETVGGRYSLWSSIGFPVAMALGWEGFAAFLDGAAAIDRHFIDADLAGNVVVRAAFADLYYTQVRGCQTRAVFAYDERLALLPDYLQQLEMESNGKRVLADGSPLTRPSAPVTWGGVGTDAQHAVFQLLHQGTHLIPVDFLAVKTQGHDLDPAHHQILLSNCFAQGAALMAGKASDDGARAYPGDRPSATILCDDLNPATLGALIAFHEHRTFVSAVMLGINPFDQFGVELGKAIAKQIESGGGEGFDPSTEALLAAVGLAG

SEQ ID NO: 29196 - protein, 334 aa, Aspergillus nidulans FGSC A4
MPKVLLTGGSGFIAAHILDQLLERGFDVVTTVRSKEKGEKILAAHPNTPKEKLSYVIVKDVAQDGAFDEAVKSDPPFDYVLHTASPFHYNVQDPVRDFLDPAIKGTTGILKAIKAYAPNVKRVTITSSFAAIVNVKNHAKVYSEEVWNPITWEEGLDSSQTYRASKTLAEKAAWDFVEKEKPSFDLATINPPLVLGPVVHYLSSLDSINTSNARISSFVRGFSKDALPPTGTYVWVDVRDVALAHVRTIEVPEAGGQRFFITAGHYSNKDIVDIIRDAYPELEDRLPPKDAPSDMPKDVYGYDNSKSMQVLGLKYRGLKESVVDTVKSLLENGA

SEQ ID NO: 29197 - protein, 386 aa, Mycobacterium avium subsp. paratuberculosis K-10
MTPPHNYLAVIKVVGIGGGGVNAVNRMIEQGLKGVEFIAINTDAQALLMSDADVKLDVGRDSTRGLGAGADPEVGRKAAEDAKDEIEELLRGADMVFVTAGEGGGTGTGGAPVVASIARKLGALTVGVVTRPFSFEGKRRSNQAEAGINALRESCDTLIVIPNDRLLQMGDAAVSLMDAFRSADEVLLNGVQGITDLITTPGLINVDFADVKGIMSGAGTALMGIGSARGEGRSLKAAEIAINSPLLEASMEGAQGVLMSIAGGSDLGLFEINEAASLVQDAAHQDANIIFGTVIDDSLGDEVRVTVIAAGFDAAGPGRKPVIGGSADKGEKTGGAHRIESAKAGKLTSTLFEPVDAVSVPIHTNGSTLNIGGEDDDVDVPPFMRR

SEQ ID NO: 29198 - protein, 548 aa, Neisseria meningitidis MC58
MKHLHDLPAWSKLWNHFDDSKTLHMREMFEQDPQRAERYWLQVGGLTLDYSKNRINDETMSLLFELAREAGVPERMRQMFHGEKINTTENRAVLHVALRNRTNSPIVVDGEDVMPKVNRVLQRMGEFAHEVRSGSWLGYTNQVITDVVNIGIGGSDLGPLMMCTALKPFGHPRLNMHFVSNVDGSQLRDVLSKVHPETTLFIIASKTFTTQETLTNALTAREWFLNHAGDEEAVAKHFAAVSTNQKAVAEFGIDTANMFEFWDWVGGRYSLWSAIGLPIMLYLGEENFIEMLNGAHLMDQHFINTPLERNLPVILALIGIWYINYYGGGSHVIAPYDQHLHRLPKFIQQLDMESNGKQVTLDGKAVGHETSPIIWGETGINGQHAFFQLLHQGTHITPIDLIASLEKRSNLPGHHEILLANVFAQAEAFMRGKTPDEVRAELKAQGMDEVRIEELVPHKTFSGNRPTNLILMDKVNPRNMGSLIAMYEHKTFVQGIIWGINSFDQWGVELGKQLAKTILGELTGETGPQKHDSSTERLINLYLQTNRK

SEQ ID NO: 29199 - protein, 345 aa, Triticum aestivum
PDSPHRLGTSPPPSAPFPGGGAEEEELTAQETALYDRQIRVWGVDAQKRLSKAHVLVCGVNGTTIEFCKNIVLAGVGSLSLMDDHIVTEDDLNSNFLIPHDESVYGGKSRAEVCCESLKDFNPMVRVAVAKGDPSLIDGTFIDRFDIIVVSRASLKTKLSINDNCRKRSKHIAFYSVDCKDSCGEIFVDLQNHSYLQKKPGGEPEQQELKYPSLQEAISVPWKDLSKKTTKLYYAMRVLESYESSEGRDPGETSLSDLPAVLALRKDMCDRMSLDESRIPTSLLERLLAAGKKEHPPVCAILGGILGQEVIKSISCKGDPIKNFFYFDDADGKGAMEDIPPTPED

SEQ ID NO: 29200 - protein, 108 aa, Escherichia coli
SDKIIHLTDDSFDTDVLKADGAILVDFWAEWCGPCKMIAPILDEIADEYQGKLTVAKLNIDQNPGTAPKYGIRSIPTLLLFKNGEVAATKVGALSKGQLKEFLDANLA

SEQ ID NO: 29201 - protein, 846 aa, Brassica oleracea
TSFLLVFVVMILFHPAFSIYINTLSSAESLTISSNRTLVSPGNIFELGFFRTPSSSRWYLGMWYKKVSDRTYVWVANRDNPLSNSIGTLKISNMNLVLIDHSNKSVWSTNHTRGNERSPVVAELLANGNFVMRDSNNNDASGFLWQSFDYPTDTLLPEMKLGYDLRTGLNRFLTSWRNSDDPSSGDFSYKLDTQRGLPEFYLWKESNFLVHRSGPWNGVGFSGMPEDQKLSYMVYNFTQNSEEVAYTFLMTNNSIYSRLTISSSGYFERLTWNPSSETWNVFWSSPEDLRCDVYKICGAYSYCDVNTSPVCNCIQGFDPWNVQEWDLRAWSGGCIRRTRLSCSGDGFTRMKNMKLPETTMAIVDRSISLKECKKRCLSDCNCTAFANTDIRNGGSGCVIWTELLEDIRTYFTNGQDLYVRLAAADLVKKRNANGKIISLIVGVSGLLLLIMFCIWKTKQKRVKGSAISIANRERSQNLPMTGMVLSSKTQLSGVNQIEELELPLIELEVVIKATENFSNCNKLGQGGFGIVYKGTLIDGQEIAVKRLSKTSIQGTDEFMNEVTLIARLQHINLVQIHGCCIEADEKMLIYEYLENLSLDSYIFGNPRSTKLNWKERFDIINGVARGLLYLHQDSRFRIIHRDLKVSNILLDKNMIPKISDFGMARIFARDETEANTMKVVGTYGYMSPEYAMGGIFSEKSDVFSFGVIVLEIVTGKRNRGFYNLSYEYSLLSYAWSNWKEGRALEIVDSVLVDSLSPLSSTFQPQEVLKCIQIGLLCVQELAEHRPTMSSVVWMLGSEATEIPHPKPPGNCVGRSPYELDPSSSRQYEDDESWTVNQYTCSVIDAR

SEQ ID NO: 29202 - protein, 681 aa, Nicotiana sylvestris
MSGSGCSIVWFRRDLRVEDNPALAAGVRAGAVIAVFIWAPEEEGHYYPGRVSRWWLKQSLAHLDSSLKSLGTSLVTKRSTDSISSLLEIVKSTGATQLFFNHLYDPISLVRDHRAKEVLTAQGISVRSFNADLLYEPWEVNDEEGRPFTTFSAFWEKCLSMPYDPEAPLLPPKRIIPGDASRCSSDSLVFEDESEKGSNALLARAWSPGWSNADKALTTFVNGPLLEYSQNRRKADSATTSFLSPHLHFGEVSVRKVFHFVRIKQVLWANEGNKAGEESVNLFLKSIGLREYSRYMSFNHPYSHERPLLGHLRYFPWVVDEGYFKAWRQGRTGYPLVDAGMRELWATGWLHDRIRVVVSSFFVKVLQLPWRWGMKYFWDTLLDADLESDALGWQYISGTLPDGREFDRIDNPQFVGYKCDPHGEYVRRWLPELSRLPTEWIHHPWNAPESVLEAAGIELGSNYPLPIVEIDSAKVRLEQALSQMWQHEAASRAAVENGMEEGHGDSADSPIAFPQAMHMEMDHEPVRNNNPVIVTVRRYEDQMVPSMTSSLFRVDDEETSVNIRNSVVDTRAEVPNDVNVTEGPRRDTLDQAVTQPARTNTTPPQFNFVVGRRNSEDSTAESSSSTRERDGGVVPVWSPSSTNYSDQYVGDDNGIGTSSSYLQRHPQSHQLMNWQRLSQTG

SEQ ID NO: 29203 - protein, 141 aa, Brassica napus
  misc_feature (127)..(127): Xaa can be any naturally occurring amino acid
MATTSTGDIEKTKSVEVKKKLNVLIVDDDPVIRKLHEIIIKSIGGISQTAKNGEEAVNIHRDGNASFDLILMDKEMPERDGLSATKKLREMKVTSMIIGVTTLADNEEERKAFMEAGLNHCLAKPLXKAKILPLINNLMDA

SEQ ID NO: 29204 - protein, 860 aa, Brassica rapa
MKGVRNIYHHSYTSFLLVFVVMILFRPTLSIYFNTLSSTESLTISNSRTLVSPGDVFELGFFKTTSSSRWYLGIWYKKLPGRTYVWVANRDNPLSNSIGTLKISNMNLVILDHSNKSVWSTNHTRGNERSLVVAELLANGNFLMRDSNSNDAYGFLWQSFDYPTDTLLPEMKLGYDLKIGLNRSLTSWRSPDDPSSGYFSYKLEGSRRLPEFYLMQGDVREHRSGPWNGIQFIGIPEDQKSSYMMYNFTDNSEEVAYTFVMTNNGIYSRLKLSSDGYLERLTWAPSSGAWNVFWSSPNHQCDMYRMCGTYSYCDVNTSPSCNCIPGFNPKNRQQWDLRIPISGCKRRTRLSCNGDGFTRMKNMKLPDTTMAIVDRSMGVKECEKRCLSDCNCTAFANADIRNGGTGCVIWTGELEDMRNYAEGGQELYVRLAAADLVKKRNGNWKIISLIVGVSVVLLLLLLLLIMFCLWKRKQNRAKAMATSIVNQQRNQNVLMNTMTQSNKRQLSRENKADEFELPLIELEAVVKATENFSNCNELGRGGFGIVYKGMLDGQEVAVKRLSKTSLQGIDEFMNEVRLIARLQHINLVRILGCCIEAGEKILIYEYLENSSLDYFLFGKKRSSNLNWKDRFAITNGVARGLLYLHQDSRFRIIHRDLKPGNILLDKYMIPKISDFGMARIFARDETQVRTDNAVGTYGYMSPEYAMYGVISEKTDVFSFGVIVLEIVIGKRNRGFYQVNPENNLPSYAWTHWAEGRALEIVDPVILDSLSSLPSTFKPKEVLKCIQIGLLCIQERAEHRPTMSSVVWMLGSEATEIPQPKPPVYCLIASYYANNPSSSRQFDDDESWTVNKYTCSVIDAR

SEQ ID NO: 29205 - protein, 403 aa, Saccharophagus degradans 2-40
MTIEIKAPTFPESVQDGTVATWHKQPGEACSRDELIVDIETDKVVLEVVAPADGSIAEIIKGEGEIILSGEVIAKFVAGAAGSAPAPAAAEAAPAASEASEDVIAAPAARKLAAEKGIDLALVKGTGKDGRITKEDVAGYKPAAAAAPAPAAAPKAAAPASTGAVAPTGLREEKRVPMTRLRARIAERLLDANNNTAMLTTFNEVNMAPVMNLRKQYKDLFEKTHNGSRLGFMGFFVKAAVEALRRFPAVNASIDGNDMVYHGYQDVGCAVSTDKGLVVPVLRNAENLSIAEIENGIRDFGLRARDGKLGIEEMTGGTFTITNGGVFGSLLSTPILNPPQAAILGMHKIQERPMAVNGEVKVLPMMYLALSYDHRIIDGKEAVQFLVTIKDLLEDPARMLLEV

SEQ ID NO: 29206 - protein, 225 aa, Solanum tuberosum
MVSRSRAGFTLNIIDTPGLVEGGYVNDQALDLIKKFLLNKTIDVLLYVDRLDAYRVDNLDKQIVKAITDSFGKEIWRRGIVVLTHAQLSPPDGLTYDEFTSRRSEALLKIVRMGARIRKQDIQAASIPVVLVENSGRCNKNESDEKILPSGTAWIPNLVQTITDAVLSGSKGILVDQKLIEGPNPNNRGKVLIPFILAFQYFFVVKRIQKSIKNDIARESRPAWA

SEQ ID NO: 29207 - protein, 318 aa, Bacillus anthracis str. 'Ames Ancestor'
MSEEKIYDVIIIGAGPAGMTAAVYTSRANLSTLMLERGIPGGQMANTEDVENYPGYESILGPDLSNKMFEHAKKFGAEYAYGDVKEVIDGKEYKTIIAGKKEYKARAIIVASGAEYKKIGVPGETELGGRGVSYCAVCDGAFFKGKELVVIGGGDSAVEEGVFLTRFASKVTIVHRRDTLRAQKILQDRAFQNEKVDFIWNHTIKEINEANGKVGSVTLVDVNSGEEKEVKTDGVFVYIGMLPLSKPFVELGITNENGYLETNERMETKVPGIFAAGDVREKMLRQIVTATGDGSIAAQSAQHYVEELLEELKTVSEK

SEQ ID NO: 29208 - protein, 169 aa, Zea mays
MAPTVMMASSATAVAPFQGLKSTASLPVARRSSRSLGNVSNGGRIRCMQVWPAYGNKKFETLSYLPPLSTDDLLKQVDYLRNGWIPCLEFSKVGFVYRENSTSPCYYDGRYWTMWKLPMFGCNDATQVYKELQEAIKSYPDAFHRVIGFDNIKQTQCVSFIAYKPPGSD

SEQ ID NO: 29209 - protein, 255 aa, Cynodon dactylon
AIDWIWKVIEHYNFAPLTAVLSVNYLDRFLSTYEFPEGQAWMTQLLAVACLSLASKVEETFVPLPLDLQVAEAKFVFEGRTIKRMELLVLSTLKWRMQAVTACSFIDYFLHKLNDHGAPSMLARSRAADLILSTAKGAEFLVFRPTEIAASIALAAMGELRSSVLERAATGCKYLNKDNVSRCYGMIQEKITLGNIALKSAGSSLSSVPQSPIGVLDAGACLSQQSDDATVGSSPATCYHSSSTSKRRRISSRLI

SEQ ID NO: 29210 - protein, 414 aa, Arabidopsis thaliana
MATHSSRSENKDAGEEDELRRRNPYEVLGIPSNSTDQEIKSAYRRMALRYHPDKNPDDPVAAEMFKEVTFAYEVLSDPENRRLYDTTGSEAVGPENEDLELDLSSLGAVNTIFAALFNKLGVQIKTTVSANLLGEALNGTVTTLPLMVGQVVSRKVEKQSAHFYSVTLTEEEAQDGLICKVHSSAKNKFKLLYFDQVENGGLSLALQEDSRKTGKLSTAGLYFFGFPVYRFDHRVNSRALSRDPETGFFKRLDAFQPFEITELKAGSHVFAVYGDNFFKSVSYTLEIFSSAPFGNEKESLRSTEAQIVSKRTELLKFEAEYHEVFAQFTEMASKCTGEVQEIDELLKRRNEICAAYTIFPPTKQGSSKSRSWSKKKSSLLMEPREEGEVAVREEGGVKKKKWYNIQLRQDKKKN

SEQ ID NO: 29211 - protein, 112 aa, Triticum aestivum
  misc_feature (30)..(30): Xaa can be any naturally occurring amino acid
  misc_feature (51)..(51): Xaa can be any naturally occurring amino acid
MPACLGISTILLAIGGGRYAHTHMAIVINXIGVWVGHLQSGCDKLMQVTFXMIRTGSDAVCVICNHSVNVSSDVSHPGFPVSEHVPHLYQMCAASCLKSSITYSPQEHNISR

SEQ ID NO: 29212 - protein, 470 aa, Ustilago maydis 521
MSLLRTQASRFVVRPLATNKVVAAAPAAARTFVTRPSTNPASTLAGRARVCAAPLPRIAIASQVRTYAAESGKFERTKPHMNIGTIGHVDHGKTTLTAAITKTLHEAQGTGKFIDYASIDKAPEERARGITISTAHVEYETGNRHYAHVDCPGHADYIRNMITGAAQMDGAIIVVSAPDGQMPQTREHLLLAKQVGIKKLVVFINKVDQIDDPEMLELVEMEMRDLLSTYGFDGENTPFVSGSALAALESRDPEVGQQAILKLMEETDKWLDLPPRDLEKPFLMPVEDVFSIPGRGTVVTGRVERGTIQKGAEVEILGLGNTFKTTLTGIEMFHKQLDQGMAGDNMGALLRGVKREQVKRGQVMVIPGSIKPVKKFRAQVYILKKEEGGRYTPFMNNYRPQLFIRTADVTVSLTHPPGTEDADEKMVMPGDNVELDGELVHDIALEEGSRFTLREGGKTVGTGIVTKIHA

SEQ ID NO: 29213 - protein, 318 aa, Chlamydophila abortus S26/3
MVSTYLLANFGGPRHSHDVEVFLTSLLTDRDVTGGCLPSFLHKRLFSFIAKKRAPKVVPQYNCIGGYSPIYQDTEALAKTLSSHLDAPVITFHRYLPDTHSQTIQQLKTLGDLPVVGVPLFPHFTYAVTGSIVRFIHNHLPSLNISWVAHFGNHPQFISCMIDHILEFLQSHDIPTHDCCLLFSAHGLPMRYVNKGDPYNVQCEKSFAAISERLPNIETFLCYQSKFGLGKWLTPSTKEVCKTLKTNKKYVLIVPFGFTSDHIETLYEIEKEYIAILIDRKYQALRVPAIYQSPQWVQSLATIIQSTRYVEKHSLIKS

SEQ ID NO: 29214 - protein, 488 aa, Listeria innocua
MNLEETMPLVFERSIPGRIGFSLPESDVPETNAGDYFDEAYLRSTPADLPELSELEIMRHYTNLSNHNFGVDSGFYPLGSCTMKYNPKINEKVARFPGFANIHPNQPESSVQGALELLYDLQTSLVEITGMDEVTLQPAAGAHGEWTGLMLIRAFHEKNGDTKRTKVIIPDSAHGTNPASAAVAGFDVVTVKSNEKGLVDVADLKKVVGEDTAALMLTNPNTLGLFEKDIVEMAEIVHAAGGKLYYDGANLNAIMAKVRPGDMGFDVVHLNLHKTFTGPHGGGGPGSGPIGVKKELIPFLPTPVLTKKDDAYTFDYNYPDSIGRVKPYYGNFGINVRAYTYIRTMGPDGLKLVTEYAVLNANYMMRKLQDAYDLPFDQVCKHEFVLSGNRQKKLGVRTVDIAKRLLDHNFHPPTVYFPLIVGEAIMIEPTETESKETLDSFIDTMLKIAKEAEENPEIVQEAPHSTYVKRLDETRAARKPVLRYQKEV

SEQ ID NO: 29215 - protein, 339 aa, Coccidioides immitis RS
MARILLTGGSGFIAAHVLDTLLERGHSVVTTVRSEEKAQRIRDAHPGVPKAKLDFVIVPDIAKPDAFDKAVVSDPPFDTVIHTASPFHFRATDAHEQLLKPAINGTVGILRAIKNSAPTVKRVVVTSSFAAILDQAKPPTYVYSEADFNPTTEEDATKNPFLGYRASKALAEKAAWDFIEKEKPNFTLATCNPPLVIGPLVHYLSSLDAINTSCERFRDLITGAGKEHCPPTVSPLWVDVRDIALAHALAAEKPEAANQRFFTVAGELSNREIAEIIWNEFPELRDRLPQGDALKSGENPPEGVFGFDNRKSKEVLGLTYRPLKEAVVDAVKSILPLVK

SEQ ID NO: 29216 - protein, 505 aa, Mesorhizobium loti MAFF303099
MPAVQDTIDRVRKIDVDQYKYGFQTEIAVAKAPKGLSEDIIRFISAKKDEPSWMLEWRLEAYRRWLTLEEPTWARVHYPKIDFQDIYYYAAPKSTPGPSSLSDVDPELLKVYEKLGIPLREQEILAGVQKTDASELEEPSDNVYKSGRVAVDAVFDSVSVVTTFKKELAQAGVIFCSISEAIREHPELVQKYLGSVVPTSDNFYATLNSAVFTDGSFVFVPKGVRCPMELSTYFRMNEKNTGQFERTLIIAEEGAYVSYLEGCTAPQRDENQLHAAVVELVALDDAEIKYSTVQNWYPGDAEGKGGIYNFVTKRGDCRGDRSKISWTQVETGSAITWKYPSCILRGDDSSGEFYSIAVSNGYQQVDSGTKMIHLGKNTSSRIISKGIAAGFSQNTYRGQVSAHRKATNARNFTNCDSLLIGDQCGAHTVPYMEAKNSTAQFEHEATTSKISEDQKFYVMQRGIPEEEAIALIVNGFVKDVIQQLPMEFAVEAQKLIGISLEGSVG

SEQ ID NO: 29217 - protein, 623 aa, Allium sativum
MESRDIESSPALNAPLLQTTPPVKSSKLKVVLLAISTSVILVLATFFAVKYSVFESGTGLVKEDAPAAGDGYPWTNDMFEWQRPGYHFQPPYHFMGDPNAAMYYKGWYHFFYQYNPYGSAWDTTISWAHAVSKDMIHWLHLPIAMVPDHWYDSKGVWSGYATTLPDGRIIVLYTGGTDELVQVQNLAEPADPSDPLLIEWKKSNHNPILMPPPGVGPHDFRDPFPVWYNESDSNWHMLIGSKDDNHYGTVLIYLTKDFKTYTLLPEILHKTKDNVGMLECVDLYPVATTGNQIGNGLEMQVGFGKGIKHVLKASMDDERHDYYAIGTFDLESFTWVPDDDTIDVGVGLRYDYGKFYASKTFYDQEKRRRILWGYVGEVDSKTDDARKGWANVLNIARTILFDVKTRSNLLVWPVEELDALRTSSKEFNGVVVEPGFTYHLDVGTASQLDIEAEFEINQEAVDAVVEADVTYNCSTSDGSAHRGLLGPFGLLVLANEKMTEKTATYFYVSRTVDGGLQTHFCQDELRSSKANDITKRVVGHTVPVLHGETFSLRILVDHSIVESFAQKGRAVATSRVYPTEAIFDSTRIFLFNNATSATLTAKSVKIWHMNSTHNHPFPGFPFP

SEQ ID NO: 29218 - protein, 353 aa, Listeria innocua
MSKLTKIQETLGKEKIEAVLVTSEFNRRYVSGFTGTSGVALILPEKAYFVTDFRYTEQAAKQAEGYEIVKHEGPIFDTVEDLLIKNDTKTLHFEADYVTVSEFKQMERLFNRQLIPLTGFFEEMRKVKTASELKAIRTACDIADAAFAHIIKFIKPGMAEIEVSNELEFFMRRAGATSSSFDTIVASGVRSALPHGVASDKKIEVGDFVTMDYGCYYDGYCSDMTRTIAVGEPAEKLKEIYQITLDAQLKVIDSLKPGMTGIEADAIARDYIASFGYGDAFGHSLGHGIGLEIHEGPNLSFKSPQKLEVGHVVTDEPGIYLPGIGGVRIEDDLLITETGNEILIHSPKELIIL

SEQ ID NO: 29219 - protein, 161 aa, Cichorium intybus x Cichorium endivia
MGFSEKQEALVKESWEVMKQDIPALSLYLYAMILEIAPEARGLFSFLKDTNVIPQNNPKLKSHAVKVFKMVCESAIQLREKGEVVVSGSTLKYLGSVHLEKGIVDPQFEVVKEALIRTVAKAMGEKCSEEMKSAWSEAYDELADAIKTEMKKEAAETQTHI

SEQ ID NO: 29220 - protein, 417 aa, uncultured archaeon GZfos23H7
MYRSYKELPKIRLPEDRGVEDINISDSTIREGAQMPGIMMHKEHKVKIYEYLHRVGIEKTESFLFNESDREAVKEMLDRGYEKPEVTGWARANPKDIDLVIEADGIEETGILMSVSDAHIFDKLGLKSREEASEKYLEAFDYALDHGLKVRCHLEDITRSDVEEFVLPLITEMIKRAPDTIMRICDTLNYGIPFLYDFPYSVPRIIKELKRRGVRNIETHIHDDYGFGAAVSIAGLWYGASWANLTFLGMGERAGVGELEKVLVFLEQRVENFHKYNLECLSEFADYIEQNVELRVPDNKAVVGRNVFAHESGIHTAGVIKNPFIYEPYPPEIVGAERKLMIGATSGSKVIRHKIEEILREKGGFGGEGRDPKIEKKDPRLKAIQADIRRQYEEDRTSCISDEEMREYVERYFLEIA

SEQ ID NO: 29221 - protein, 288 aa, Oryza sativa (japonica cultivar-group)
MSAFAPSLPLHVAAAATAVASQGRRGRIKTTSTCWRRRAAVPVNMAAATSSALSKLAPLEAILFDIDGTLCDSDPIHFCAFRELLQQVGFNNGVPISEEFYSANISGGHNDDLARALFPDLDHDKAMKFMDDKEALYRRLAPEQLVAVEGLHDLCRWIKDHKLKRAAVTNAPRSNAELMLSLLGLTEFFPVLVIGSECDRAKPFPDPYLKALELIGASPDHTFIFEDSASGIRAGVAANVPVVGLTTRNPEKVLQDAGASLLIKDFQDPKLLSILEEIEPTVAAVEQV

SEQ ID NO: 29222 - protein, 108 aa, Escherichia coli
SDKIIHLTDDSFDTDVLKADGAILVDFWAEWCGHCKMIAPILDEIADEYQGKLTVAKLNIDQNPGTAPKYGIRGIPTLLLFKNGEVAATKVGALSKGQLKEFLDANLA

SEQ ID NO: 29223 - protein, 332 aa, Arabidopsis thaliana
  misc_feature (199)..(199): Xaa can be any naturally occurring amino acid
MQIGQALAAAKEGESQMIVMMGNNLSLTSIILNGDPSIEHKGKLTCLDEQVKISQFYHCEGLLLCILKDDSRFVVCNPYLEQTRWIEPRYSHRPYGMDRFSYALGYVNTDSCRSYKLLRFIDYYYNAPEKQFFWYEVYDFDSDLWTTLDVTPHWRIAFCNTGVPFKGNTYWCAAERNVDVDEVLANRLICFDFTNDVIXVREEKLAVLLQHDESNPYELDLSITTKIETGEVLWSKFLRVETAGFDSYVPFISGSFFIDEEKKVAFGFDDRNRHTVIVIGEAGYLRALDLVGDFGDQSCKPDLCSYVPSLVQIKQPEGGEREEESEYGEASI

SEQ ID NO: 29224 - protein, 136 aa, Mycobacterium tuberculosis CDC1551
MGLLSRLRKREPISIYDKIGGHEAIEVVVEDFYVRVLADDQLSAFFSGTNMSRLKGKQVEFFAAALGGPEPYTGAPMKQVHQGRGITMHHFSLVAGHLADALTAAGVPSETITEILGVIAPLAVDVTSGESTTAPV

SEQ ID NO: 29225 - protein, 289 aa, Medicago truncatula
MLFSSVRYSSIIVLRHYNLLPPRVSLLLRFFASVPPPTPMDNNRATPSSSGNSRGRAFDTRNDRERTRGRGGGSGPSGSGKDKIDALGRLLTRILRHMASELKLNMRSDGFVNVNDLLKLNLKTFANIPLRSHTIDDIREAVRKDNKQRFSLVEENGELLIRANQGHTTTAVETESLLKPILSAEEFPVCVHGTYKRNLDSILASGLKRMKRLHVHFSRGLPTDGEVISGMRRDVNVLIYLDVRKALEEGMKLYISDNKVILTEGFDGVVPSKYFQKIESWPGRQPIPF

SEQ ID NO: 29226 - protein, 264 aa, Triticum aestivum
  misc_feature (166)..(166): Xaa can be any naturally occurring amino acid
MTSLPERGAAPPSNPTPSSSREGDAAVASSSSSASEEQKKDGSPKQCKASILSSVLTIFEPDQDQSGRSGGHASGSYAWSRVLRRFVGGGSMWRFLGCGKALTAGDVWFLGKCYKLSSEESSSDSDSEGGHAAFLEDFSSRVWITYRKGFDAISDSKLTSDVNWGXCMVRSSQMLVAQALIFHHLGRSWRKPAQSPSDPEHTRILHLFGDSEVCAFSIHNLLQAGKSYGLAAGSWVGHIYVGKLSDKQRAPEINRMKSYGAYVA

SEQ ID NO: 29227 - protein, 139 aa, Brassica napus
  misc_feature (122)..(122): Xaa can be any naturally occurring amino acid
MESPAAAAAAKPARGGAGGRKGGDRKKSVTKSVKAGLQFPVGRISRYLKKGRYAVRYGAGAPVYLAAVLEYLAAEVLELAGNAARDNKKNRINPRHLCLAIRNDEELGKLLHGVTISSGGVXPNINPVLLPKRAAGSEK

SEQ ID NO: 29228 - protein, 215 aa, Glycine max
MDSDSWISTRMSSSSRRYHSRSDLYVEESEGSDDFRAEFLCPFCAEDYDVVSLCCHIDDHHPIQAKNGVCPICGKKVGLDLVGHITTQHGNFLRVQRKRRVRKVGSGSTMSILRKELREGALHSLLGGSSYLASCNSEPDPLLSSFMFNPAVTDDSASAKPPSVEDALVKESSKDDFLKSLPQQLQLSEEDQVEKARRFEFVQGLLMSTILDDKL

SEQ ID NO: 29229 - protein, 274 aa, Nicotiana tabacum
MAQTMLLTANAKVDLRSKESLVERLKPKPLSSFFLPSLPLKYPSASASASSHFTSTTVALFKSKAKAPAKKVVPKPKEKVEDGIFGTSGGIGFTKQNELFVGRVAMIGFAASLLGEAITGKGILAQLNLETGIPIYEAEPLLLFFILFNLLGAIGALEDRGKFIDDPAPPTGLDKAVIPPGKGFKSALGLSEGGPLFEFTKANELFVGRLAQLGIAFSIIGEIITGKGALAQLNFETGVPINEIEPLLLFNIVFFFVAAINPGTGKFVTDEEEE

SEQ ID NO: 29230 - protein, 140 aa, Triticum aestivum
MLPAAMAAGLAWSRPRSITTANSIGMARGAAIPLVLVAMVATMLLVATDAAISCGQVTSALSPCISYARGNGANPTAACCSGVRSLAGAARSTADKQAACKCIKSAAGGLNAGKAAGIPSKCGVSVPYAISANVDCSKIR

SEQ ID NO: 29231 - protein, 310 aa, Zea mays
MSAELKRDYEIREEIGRGRFGVVHRCTSRATGEAYAVKSVDRSRLGDDLDRELAQLEPKLAQLAGAGNPGVVQVHAAYEDEAWTHVVMDLCPGPDLLEWVARRRGAPVPEPVAAAIVAQVAQALALCHRRGVAHRDVKPENILIDAADDAGSDDEAEAEAAPRARLADFGSAAWVGAGGLGRAEGLVGTPHYVAPEVVAGGEYGAKADVWSAGVVMYALLSGGALPFGGDSAAEVLAAVLRGSARFPPRLFGGVSPAAQDLMRRMICRDEWRRFTVEQVLGEFFRSFPRQPLSSSCSVDLISPCSSMQFI

SEQ ID NO: 29232 - protein, 138 aa, Shorea ovalis
EKNIPVLLGLLSLWNVSFLGYPARAILPYSQALEKFAPHIQQVSMESNGKGVSIDGVPLPYEAGEIDFGEPGTNGQHSFYQLIHQGRVIPCDFIGSAKSQQPIHLKGEVVSNHDELMSNFFAQPDALAFGKTPEQLHK

SEQ ID NO: 29233 - protein, 509 aa, Bacillus licheniformis ATCC 14580
MVLEANIKAQLNQYMQMIENDIVLKVSAGDDSVSKDMLALVEELASMSSKITVEKAQLDRTPSFSVNRAEEDTGVTFAGVPLGHEFTSLVLALLQVSGRPPKVDQKIIDQIKNISGEYRFESYISLTCHNCPDVVQALNMMSVLNPNISHTMIDGAAYKSEVESKNIMAVPTVYLNGESFGSGRMTLEEILAKMGSGTDASELSDKEPFDVLVVGGGPAGASAAIYAARKGIRTGIVAERFGGQVLDTMSIENFISVKRTEGPKLAASLEEHVKDYDIDVMNLQRAKGLEKKDLFHLELENGAVLKSKTVILSTGARWRNIGVPGEQEFKNKGVAYCPHCDGPLFEGKDVAVIGGGNSGIEAAIDLAGIVNHVTVLEFAPELKADKVLQKRLYSLPNVTVVKNAQTKEITGDENVNGITYVDRETGEEKHVELQGVFVQIGLVPNTEWLPETVERNRIGEIAVDKRGETTIPGLFAAGDCTDSPYNQIIISMGSGANAALGAFDYLIRN

SEQ ID NO: 29234 - protein, 138 aa, Shorea ovalis
EKNIPVLLGLLSIWNVSFLGYPARAILPYSQALEKFAPHIQQVSMESNGKGVAIDGVPLPYEAGEIDFGEPGTNGQHSFYQLIHQGRVIPCDFIGSAKSQQPIHLKGEVVSNHDELMSNFFAQPDALAFGKTPEELHK

SEQ ID NO: 29235 - protein, 138 aa, Shorea ovalis
EKNIPVLLGLLSIWNVSFLGYPARAILPYSQALEKFAPHIQQLSMESNGKGVSIDGVPLPYEAGEIDFGEPGTNGQHSFYQLIHQGRVIPCDFIGSAKSQQPIHLKGEVVSNHDELMSNFFAQPDALAFGKTPEELHK

SEQ ID NO: 29236 - protein, 300 aa, Arabidopsis thaliana
  misc_feature (141)..(141): Xaa can be any naturally occurring amino acid
MGGSREFRAEEHSNQFHSIIAMAIWLGAIHFNVALVLCSLIFLPPSLSLMVLGLLSLFIFIPIDHRSKYGRKLARYICKHACNYFPVSLYVEDYEAFQPNRAYVFGYEPHSVLPIGVVALCDLTGFMPIPNIKVLASSAGXTAASRKNFTSLLDSGYSCVLVPGGVQETFHMQHDAENVFLSRRRGFVRIAMEQGSPLVPVFCFGQARVYKWWKPDCDLYLKLSRAIRFTPICFWGVFGSPLPCRQPMHVVVGKPIEVTKTLKPTDEEIAKFHGQYVEALRDLFERHKSRVGYDLELKIL

SEQ ID NO: 29237 - protein, 733 aa, Debaryomyces hansenii CBS767
MSKNKLPSRSNHANSLTGGSAISRLVFIFAQLPNLVKALPIFSRNVDIEHNDIAEAMIMTPELFYTNLFTSVFLVLAGGVFAGLTLGLMGQDEVYLKVIATSGEPQERSHARKVLKLIGRGKHWVLVTLLLSNVITNETLPIVLDRCLGGGWPAVITSTVSIVIFGEIIPQSICVRYGLQVGAMFSPFVLMLMYVMYPVAYPCALLLDHILGEDHGTVYKKSGLKTLVTLHKTMGVERLNQDEVTIISAVLDLKEKPVAHIMTPMDRVYTMSADAILDEKTVEEIFNAGFSRIPIHLPNEPMNFIGMLLVRVLISYDPEDALPVASFPLATLPETGRDTSCLNILNYFQEGKSHMIVVSENPGEPTGSLGVLTLEDVIEELIGEEIVDESDVYIDINKNIKRTQPGPLSKRNLTTYLNNMYHKSASASKRNSLDDSALTPLKDSFAEVSSSPSRQKLFHGSGSAGNSPKIGPVDATKGWKPLNPASNPLELNKSFVKIKRPDMESVKNSVMPPPKRLPPKNTTSYGAIHATEEGALNSAKNLSAESQNEIGNHDRAQRFLLPEEKETDLSEIMGRKKNQNGHDQNPDDFQHHHGSHNGEGYDVHYHNDYSSSHSHNIVPEYQEARSYRTGGIIESVVNVQGVHKTIIENVDEENDYSHLRNSFGDSLENSQVSGLADNRDDNEEAEGLLAGLKKKAIGSSVLSGNSSNSDDSKKRKSSVWDKFMNNSNSNSNS

SEQ ID NO: 29238 - protein, 148 aa, Plantago major
MASRRILKELRELQRDPPTSCSAGPVAQDMFHWQATIIGPNDSPYAGGVFQVTIHFPTDYPFKPPKVAFRTKVFHPNINNNGNICLDILKDQWSPALTISKVLLSICSLLTDPNPDDPLVPEIAHIYKNDKPKYESMARNWTHKYAMC

SEQ ID NO: 29239 - protein, 139 aa, Triticum aestivum
MATSIMASMALKSSPSPFSGQSQLQRIQPSARSSSFRVMSKKAKKVQTSQPFGPGGGLELKDGVDASGRPAKGKGVYQFASKYGANVDGYSPIYNPEEWSPSGDYYAGGKTGLLLWVATLAGILLGGALLVYNTSALAS

SEQ ID NO: 29240 - protein, 139 aa, Shigella flexneri 2a str. 301
MNTVCTHCQAINRIPDDRIEDAAKCGRCGHDLFDGEVINATGETLDKLLKDDLPVVIDFWAPWCGPCRNFAPIFEDVAQERSGKVRFVKVNTEAERELSSRFGIRSIPTIMIFKNGQVVDMLNGAVPKAPFDSWLNESL

SEQ ID NO: 29241 - protein, 152 aa, Arabidopsis thaliana
MGLFSRAGNIFRQPRALQASNAMLQGNLSLTPSKIFVGGLSPSTDVELLKEAFGSFGKIVDAVVVLDRESGLSRGFGFVTYDSIEVANNAMQAMQNKELDGRIIGVHPADSGGGGGGGGFARRGGYGGGRGGYARGGFGRGGFGGGGYGFVR

SEQ ID NO: 29242 - protein, 284 aa, Methylococcus capsulatus str. Bath
MSEGNSGEHRSWLERLVHFLSGEPASREELLDALRHAQKRQLIETEALNMIEGVLQVSELRVRDIMIPRAQMAVVPQDAELERVFPLVVESGHSRYPVIADDRAEVVGILLVKDLLAQSLRNRHIKVSAIMRPALFVPESKRLNVLLKEFKTSRSHMAIVVDEYGAAAGLVTIEDVLEQIVGEIEDEHDLGEEEYIFRKNDQEYTLKAITPIEEFNEYFGTDFEDDEYDTVGGMIVHRLGHVPERGERIEIGPFRFTVIRADNRRVHLLRLLRLSVDSLRPAAG

SEQ ID NO: 29243 - protein, 284 aa, Listeria innocua
MGEIIDGKKLAKEIQEKVTSEVAELVKQGKKPGLAVVLVGDNQASRTYVRNKQKRTEEAGMKSVLIELPETVTEEKLLKVVEELNEDNTIHGILVQLPLPKHISEEKVIDAISFDKDVDGFHPVNVGNLFIGKDSFVPCTPAGIIELIKSTGTQIEGKRAVVIGRSNIVGKPVAQLLLNENATVTIAHSRTKDLPQVAKEADILVVATGLAKFVKKEYIKPGAIVIDVGMDRDENNKLCGDVDFDDVKEQAGFITPVPGGVGPMTITMLLANTLKAAKRIWKMN

SEQ ID NO: 29244 - protein, 182 aa, Trichoderma atroviride
  misc_feature (56)..(56): Xaa can be any naturally occurring amino acid
QRQAEGKPTDKPNIIMSSAVQVCWEKAARYFEVEEKYVYCTPDRYTIDPQQAVDLXDENTIGIAAILGTTYTGHYEDVKGINDLLEEKGLDVSIHVDAASGGFVAPFVLPDLEWDFRLPRVVSINASGHKYGLVYPGVGWVVWRSHEYLPQDLIFNINYLGAEQSSFTLNFSKGASQVIGQY

SEQ ID NO: 29245 - protein, 456 aa, Coriandrum sativum
MQSLLQSSFTPTFRLPKPCHHIPRPPRKLSVFATSASPKREKDPKKRVVVTGLGVVSVFGNDVDTYYDKLLAGESGVDFIDRFDASEFPTRFAAQIRAFSSEGYIDSKNDRRLDNCLRYNIVAGKKALENAGLGEDMRSKIDKERAGVLVGSGMGGITAFCDGVENLITKGYKKISPFFIPYTITNMGSALLAIDLGFMGPNYSIVAACATSNYAFYAAANHIRSGEADLMLAGGAEAAIVPVGLGGFTSCRAMSQRNDNPKAASRPWDKDRDGLVMGEGAGVLVMESLVHAMKRGAPIIAEYLGGAVTCDAHHMTDPRPDGGGVSMCIQSGLQEAGVVSPEEVNYINAHATSTLAGDLKEVTAIKQVLGQIKANATKSMNAHCLGAASGLEAVATVKAIATGWLHPTINQVNLEPEVDFDTVANKKQQHEVNVGISNSFGFGGHNSVVVFSAFNP

SEQ ID NO: 29246 - protein, 282 aa, Burkholderia sp. 383
MDTTLATFEKDVIEASLDAPVLVDFWAPWCGPCKTLGPLLEKLEGDYEGRWKLVKVNVDENQELAAHFQTRSIPHVIAFADGRPVDQFVGVLPEGQLRAFLDRLLPAPEEAERRAAQYAMAEERYDDALTHLEAALALNPGFDDARLDLIELLLASNQVDAARAETERLSPQTLQNGDPRYQAIKTRFDALEATADLPPTDALEARIAANPADLDARFDLAQSLIARRAYEGAVEQLLEIVTRDRAYGDDLGRRTLISVFELAGDRPDLVAGWRRKLSMALN

SEQ ID NO: 29247 - protein, 533 aa, Triticum aestivum
  misc_feature (24)..(24): Xaa can be any naturally occurring amino acid
AATHASERAGGGLRWRACAAVLGXSAVVALVVFGAGGAGRAARPASVPATPATEFPRSRGKEHGVSEKTSGAYSANGGFPWSNAMLQWQRTGYHFQPDKYYQNDPNGPVYYGGWYHFFYQYNPSGSVWEPQIVWGHAVSKDLIHWRHLPPALVPDQWYDIKGVLTGSITVLPDGKVVLLYTGNTETFAQVTCLAEPADPSDPLLREWVKHPANPVVFPPPGIGMKDFRDPTTAWFDESDGTWRTIIGSKNDSDHSGIVFSYKTKDFVSYELMPGYMYRGPKGTGEYECIDLYAVGGGRKASDMYNSTAEDVLYVLKESSDDDRHDWYSLGRFDAAANKWTPIDTELELGVGLRYDWGKYYASKSFYDPVKQRRVVWAYVGETDSERADITKGWANLQSIPRTVALDEKTRTNLIQWPVEELDTLRINTTDLSGFTVGAGSVVPLPLHQTSQLDGEDFSVRVLVDHSIVQSFVMGGRMTATSRAYPTEAIYAAAGVYLFNNATGASITAEKLVVHDMDSSYNRIFTDEDLLVLD

SEQ ID NO: 29248 - protein, 859 aa, Legionella pneumophila str. Lens
MSGILIMQQVVIKFGGTSVSTRATWNNIAAITQKHLNTGVQPVIVCSALTQISNKLEKAIEAALLDEHHSLFNDIQSSHLNLAEQLEVNHQLIANDLHQLQQWLTGISLLKQAPAKTHAQILSLGELMMTRMGHAFLERHEIKVKWYDARELLTSTPTLGGETMNYLSARCESEYDPGLVEKFLSSGAQAIITQGFFAANPHGETVLLGRGGSDTSAALLAGKLQAASCEIWTDVPGIYTANPHQLPHARLLKQLNYDEAQEIASMGAKVLHPNCIPPVRKANIPMVVKYTHLPEHSGTLITKDIDESAPLIKSIQVKHSILLISIDTLNMWQQVGFLADVFAAFKKHGFSVDLLSSSEFNVTLSLDVNAKIHDRPAINALLDDLNQFGRAKLIEPCSAVSLVGHHIRTVLPHLGPALEVFEAKQVYLMSLASNDLNLTFVVDESHADKLCQRLHHLLIESNPQIFYYSKSWHEEFGKPNVRPTPWWEIERDRLLTTSAIHSPCYVYHSPTQAIRARQLSALESIDSLFYAVKANPFPSILKTLEKEGIGFECVSIQELELVLKLFPNIKKERILFTPNFAPKSEYEFALQTGCYVTIDSLYPLENWPELFKNREVIVRIDPGTGAGHHKHVSTGGNESKFGITQNDISKILSLTKSNHIKVIGLHAHSGSGILSTDLWQQTAVMLASLTDQFPEVRSINLGGGLGIVEKPGQHPIDFAALDAQLMAVKSQYPGLAIWLEPGRFFVAESGVILAKVTQCKEKGKVKFIGIETGMNSLIRPSLYGAYHEIVNLTRLHEEKAGFAHIVGPICESGDTLGYDRLLPVTKEGDVILIANTGAYGHCMSSHYNLRPPAQEIVLE

SEQ ID NO: 29249 - protein, 267 aa, Streptomyces toyocaensis
MTGDRTRVRYEKKQHVARITLDRPDVLNAMDLRMHEELAEIWDDVEADDDIRVAVLTGAGDRAFSVGQDLKERARLDRQGVAPTTFGSRGQPGWPRLTDRFTLYKPVLARVHGYALGGGFELALACDLIIASDQAVFALPEARLGLVPGAGGAFRLARQLPEKIAMGYLLTGRRLSAATALRHGLVNEVVPADRLDACVQEWTDDLVRSAPLSVRAIKEAAAKSVDMPLEQAFTAEYGWEERRRRSSDAVEGVRAFADRRDPVWTGR

SEQ ID NO: 29250 - protein, 664 aa, Arabidopsis thaliana
MEGTLDEENLVFETTKGIKPIKSFDDMGMNDKVLRGVYDYGYKKPSEIQQRALVPILKGRDVIAQAQSGTGKTSMIAISVCQIVNISSRKVQVLVLSPSRELASQTEKTIQAIGAHTNIQAHACIGGKSIGEDIKKLERGVHAVSGTPGRVYDMIKRGSLQTKAVKLLVLDESDEMLSKGLKDQIYDVYRALPHDIQVCLISATLPQEILEMTEKFMTDPVRILVKPDELTLEGIKQYYVDVDKEEWKFDTLCDLYGRLTINQAIIFCNTRQKVDWLTEKMRSSNFIVSSMHGDKRQKERDDIMNQFRSFKSRVLIASDVWARGIDVQTVSHVINYDIPNNPELYIHRIGRAGRFGREGVAINFVKSSDMKDLKDIERHYGNEDEDHERAYEASQFSFATYSFRNLFSIFFFSSDITSLSVYLGGDTLSEQRRTMFIQTQSTPNPSSLMFSPGKPVMEIGSADFPNSRSAMSSPLAKAIFAIDGIPRLLLQHTIVSSSYNPCFVTKIVSVDAGVVRVFYGSDFVTVTKSDDVTWDILKPDIFAVVMDFYSSGQPLFLDSQATAAKDTAIHEDDSETVAMIKELLETRIRPSVQDDGGDIEYCGFDTETGIVKLRMQGACSGCPSSSVTLKSGIENMLMHYVSEVKGVEQEFDGEEEGTSSGPME

SEQ ID NO: 29251 - protein, 167 aa, Helianthus annuus
MATQSKKTLYDFTVKDAKGNDVDLSVYKGKVVLIVNVASKCGLTNNSYDELNQIYLKYKEKGFEILAFPCNQFGQQEPGTNEEIVDFVCTKFKSEFPIFDKIDVNGENAAPVYEFLKTGFYGILGGDIQWNFSKFLVDKNGQPVDCYYPTTSPLTVERDIQKLLGLL

SEQ ID NO: 29252 - protein, 166 aa, Bordetella bronchiseptica RB50
MNTMYDFSAPTITGAERALADFRGQVALVVNVASRCGFTPQYSGLEELYRSYRNEGFVVLGFPCNQFGRQEPDDEAAIAQFCETQYAISFPLFAKIDVNGAHAHPLYRWLKARKPGLLGTRAIKWNFTKFLVGRDGLPLRRYAPAHTPESLRHDIARACAAPGPTP

SEQ ID NO: 29253 - protein, 967 aa, Lupinus albus
MANRNLEKMASIDAQLRQLAPAKVSEDDKLVEYDALLLDRFLDILQDLHGEDMKETVQEIYELSAEYEGKHDPKKLEELGNLITSLDAGDSIVFAKAFSHMLNLANLAEEVQIAHRRRNKLKKGDFADENNATTESDIEETFKRLVRELKKSPQEVFDALKNQTVDLVLTAHPTQSIRRSLLQKHGRIRNNLTELYAKDITPDDKQELDEALQREIQAAFRTDEIRRTPPTPQDEMRAGMSYFHETIWKGVPQFLRRVDTALKNIGINERVPYNAPLIQFSSWMGGDRDGNPRVTPEVTRDVCLLARMMAANLYYSMIDDLMFELSMWRCNDELRVRADEISRSSKKDAVAKHYIEFWKIIPSSEPYRVILGDVRDRLYRTRERSRYLLAQGYSDIPEEETLTSVEEFLEPLELCYRSLRVCGDRAIADGTLLDFLRQVSTFGLSLVRLDIRQESDRHTDVLDAITQHLGIGSYQEWSEEKRQQWLLSELSGKRPLFGPDLPQTEEIKDVLDTLHVIAELPPDNFGAYIISMATAASDVLAVELLQRECRIKHPLRVVPLFEKLADLESAPAALARLFSIDWYRNRINGKQEVMIGYSDSGKDAGRFSAAWQLYKAQEELIEVAKKFGVKLTMFHGRGGTVGRGGGPTHLAILSQPPETIHGSLRVTVQGEVIEQSFGEQHLCFRTLQRYTAATLEHGMHPPISPKPEWRALMDQMAVIATEEYRSIVFQEPRFVEYFRLATPELEYGRMNIGSRPAKRRPTGGIETLRAIPWIFAWTQTRFHLPVWLGFGAAFRQVITKDVRNLNMLQEMYNQWPFFRVTIDLVEMVFAKGDPGIAALYDRLLVSEDLWSFGEQLRTKFEETKKLLLQVAAHKDLLEGDPYLKQRLRLRDSYITTLNVCQAYTLKRIRDPNYDVKLRPHISKECIEISKAADELITLNPTSEYAPGLEDTLILTVKGIAAGLQNTG

SEQ ID NO: 29254 - protein, 322 aa, Desulfitobacterium hafniense DCB-2
MPPVIIPTKVKGEHMGSVKIGTRDSQLALWQAEWVKRKLEEYYPEREFVLVPMKTKGDKILDVPLAKIGDKGLFTKELEVGLLNGEIDCAVHSLKDLPTVLPPGLEIAAFCEREEPRDVFLSKDGTPLGSLPAGSIIGTSSLRRKAQLQNYRSDLSFADLRGNLQTRWRKLQESDMAGIVLAAAGVKRLGWEDRITEYISEEIMLSAVGQGAIAVEIAAQRADVREMLDLLNHGDTERAVKAERALLYRLEGGCQIPIGAWAVTEQQQIVLKGMVASLDGQRILKVTLSGEHPEELGRQAADLLIAQGALEILQEIRTPLEK

SEQ ID NO: 29255 - protein, 399 aa, Bacillus thuringiensis serovar konkukian str. 97-27
MAVEVVMPKLGMAMKEGVITSWNIKAGDYVSKGELIASINSEKIETEIEAPADGTVLDIAVSEDEGVPPGTVICYIGKSNEKVEVYESTNVVEEKTSNPEPKKVPHPDPYVIDVTKQRVKISPVAKKIAKTENLDIKSLLGTGPGGRITKVDVLKALEERVAISEVLEQEESKVVPVTGMRKAIANRMHASLQNSAQLTLTMKVDVTDLVALHKDVAEVVQKRYDNKLTITDFVSRAVVLALKEHKEMNSAYIDDAIHQYKHVHLGMAVALEKGLVVPAIRFANNLSLVELSKEIKNMAQKARAGNLSSDDMQGTTFTISNLGSFGIEYFTPVLNTPETGILGVGAIEHVPVYKGKKLRKGSMLPLSLTFDHRVLDGAPAAAFLRTIKRYLEEPVTILL

SEQ ID NO: 29256 - protein, 968 aa, Lupinus albus
MANNRNMEKMASIDAQLRQLAPAKVSEDDKLIEYDALLLDRFLDILQDLHGEDLKNTVQDVYELSSEYEGKHDPKKLEEIGNAITSLDAGDSIVVAKSFSHMLNLANLAEEVQISHRRRNKLKKGNFADETNATTESDIEETLKRLVFDLKKSPQEVFDALKNQTVDLVLTAHPTQSIRRSLLQKHARIRNCLSQLYAKDITPDDKQELDESLQREIQAAFRTDEIKRTPPTPQDEMRAGMSYFHETIWKGVPKFLRRIDTALKNIGINERVPHNAPVIQFSSWMGGDRDGNPRVTPEVTRDVCLLARMMASNMYYSQIEDLMFELSMWRCSDELRDRADELHRSSNKDEVAKHYIEFWKKVPPNEPYRVVLGEVRDRLYQTRERSRHLLAHGYSDIPEEATFTNVEEFLEPLEVCYRSLCACGDRSIADGSLLDFLRQVSTFGLSLVRLDIRQESDRHTDVMDAITKHLEIGSYQEWSEEKRQEWLLSELCGKRPLFGPDLPKTEEIRDVLDTFHVLAELPPDNFGAYIISMATAPSDVLAVELLQRECHIKHPLRVVPLFEKLADLEAAPAALARLFSVDWYKNRIDGKQEVMIGYSDSGKDAGRFSAAWQLYKAQEDLIKVAEKFGVKLTMFHGRGGTVGRGGGPTHLAILSQPPGTIHGSLRVTVQGEVIEQSFGEQHLCFRTLQRYTAATLEHGMNPPISPKPEWRALMDQMAVVATEEYRSIVFKEPRFVEYFRLATPELEYGRMNIGSRPAKRRPTGGIETLRAIPWIFAWTQTRFHLPVWLGFGKAFKQVIEKDAGNLLMLQEMYNQWPFFRVTIDLVEMVFAKGDPGIAALNDRLLVSKDLWPFGEQLRKKYEETKNHLLQVAAHKDLLEGDPYLKQRLRLRDSYITTLNVFQAYTLKRIRDPNFNVPPRPHISKDYLEKSKSATELVSLNPTSEYAPGLEDSLILSMKGIAAGMQNTG

SEQ ID NO: 29257 - protein, 370 aa, Pseudomonas fluorescens Pf-5
MSRINPAVKPPHRIAVIAGDGIGREVVPEGLRVLEAVSRRFGIALQFDHFNWCSEHYQAHGSMMPDDWAQQIGGHEAIFFGAVGAPDIVPDHIAVWDSLLKIRRQFDQYVNIRPVRLMPGVPCPLAGRAPGDIDFIVVRENTEGEYSSVGGRMWEGTPREIALQESVFSRHGVDRVVNYAFELASRRPRRNLVAATKSNGIAITMPFWDERVEALAQAYPQVATRKFHIDILCAHFVQHPDWFDVVVASNLFGDILSDLGPACTGTIGIAPSANLNPERLYPSLFEPVHGSAPDIAGLGVANPIGQIWSAALMIEHLGQGDELYQRAAAAIVESIETVLAEGPRTREMGGNASTVEVGRAIAECLAGNRS

SEQ ID NO: 29258 - protein, 610 aa, Pseudomonas chlororaphis
MCGLTGWVDYTRRLEGEDPAIRAMTNTLALRGPDAEGIWKHRHALLGHRRLAVIDLSGGTQPMVYRFADGQEVSLVYTGEVYNHDALRDQLRQAGHVFQTRSDTEVVLHAYLEWGERCCDHLTGMFAFALFDGRDGHLLLVRDRLGIKPLFYARHREGLLFGSETKAILAHPEFTTGLEVTGLVDVLTLSKGTAQTPFRNLMELLPGHFLSWRPNGQMKIQSYWKVRRQEHQHDLQTTVQQTRELVTHALGSQLHADVPVCSLLSGGLDSTTLTAIAQRIVKAKTGGNINSFSVDFTGQAEQFKSDDLRPDQDQPFALLAAEFIGSRHQTVLIDNEELVSYLAREEVFRARELPFTFGDMDTSLNLLFREIRKHSTVAISGEGADEVFGGYGWFRDPKVIASASFPWSSRVKLPAGFINADFNRQCDLAQYQQASYDDALLQVEHLAQDSPHERRMRELCHMHLKRWMVMLLDRKDRLSMCNSLEVRVPFTDHELVEYIYNVPWSIKSKDGEEKWLLKQACADFVPEAVLKRRKSPYPTSADLGYERFLRQSARQLLQDTGNPVFGIVSHAYMAEELRQPEGYFNTQISRHSLETALALDAWLRLHKISL

SEQ ID NO: 29259 - protein, 138 aa, Shorea beccariana
EKNIPVLLGLLSIWNVSFLGYPARTILPYSQALEKFAPHIQQVSMESNGKGVSIDGVPLPYEAGEIDFGEPGTNGQHSFYQLIHQGRVIPCDFIGSAKSQQPIHLKGEVVSNHDELMSNFFAQPDALAFGKTPEELHK

SEQ ID NO: 29260 - protein, 300 aa, Ehrlichia ruminantium str. Gardel
MEGNIVSGKAVADNITNILATCISDLKVQHNLTPCLIVVLVGDDPASQLYVRNKQRKAEMLGLRSETMLLPSTISESSLIEKIHQLNNDDSVHGILVQLPVPRHIDKNLIINTIDPKKDVDGFHNENVGRLFTGQKKNCLVPCTPQGCLYLIKTITRNLSGSDAVVIGRSNIVGKPMACLLLGENCTVTTVHSATRDLPDYCRRADILVAAVGIPRFVKYSWVKHGAIVIDVGINSIEEDGVKKFVGDVDFAEVNKIASAITPVPGGVGPMTIAFLMVNTIIAACNQSGIHGFLEKYLDL

SEQ ID NO: 29261 - protein, 375 aa, Pseudomonas fluorescens Pf-5
MLRTRSPASSLLQGWHCRCRSELARESVLRDTPRPKRDPDMSDTPHFPLSAVVGAEALKLALCLTAIDPKIGGVLIEGPRGMAKSTLARGLADLLASGQFVTLPLGATEERLVGTLDLDAALGQGRAQFSPGVLAKADGGVLYVDEVNLLPDHLVDLLLDVAASGTNLIERDGISHRHSAKFVLIGTMNPEEGELRPQLLDRFGLNVALSGQPAPQERGQIIRRRLDFDSDPQGFCAQWAEPQTALRERCQQARAALASIPLDDQALALITERCFAAAVDGLRADLVWLRAARAHAAWRGAPAIAEEDIDAVAEFALRHRRRETPPSAPQSGQSPQAPAPSNANPSEGQGQWGEMPAQALPTGARREVPSWPKKP

SEQ ID NO: 29262 - protein, 413 aa, Arabidopsis thaliana
MTLTISDLPRDLKKKIFSRIPLRYVRALRLTCKEWETLIKSRSLKIDEEESQMVALMDYNLCLMSKSFNGGDPSTEIKGKLTCFDEQVKVSMLFHCEGLLLCILKDDNTKVVVWNPYLGQRRFIQVRFSHIPGGWDQFSYALGYYKNNNMMKSFKLLRFFDYFYTSNDFVFYEIYDFDSGLWKTLDVTPYWRIRFFDDIGVSLKGNTYWCAKERKPEWNADPFIIVDHIICFDFTSERFGPLVPLPFRAMKESLVTLSCVREEKLAALFCRDVVVEVWITTTIEFDKVSWSKFLTFGVRDCPMIYSCTGSFFIDEVNKVAVIFGQPLKRDKVFIIGEAGQVRDVDLGEPAHQDSWLYVCPYVPSLVKIKQPPGCKRRRQSSSENRRYKRNMMRLVELEKYHIAMEPKRGDKTI

SEQ ID NO: 29263 - protein, 144 aa, Glycine max
MGAFTEKQEALVSSSFEAFKANIPQYSVVFYNSILEKAPAAKDLFSFLANGVDPTNPKLTGHAEKLFALVRDSAGQLKTNGTVVADAALVSIHAQKAVTDPQFVVVKEALLKTIKEAVGGNWSDELSSAWEVAYDELAAAIKKA

SEQ ID NO: 29264 - protein, 140 aa, Mycoplasma fermentans
  misc_feature (54)..(54): Xaa can be any naturally occurring amino acid
VVTTPFELIEGKHKSLIAQEGLKKLSEVVDSYIVISNKKLVENYRTLPVQEAFXVSNYTLKNSIKIIRDIIFETGFINLDFNDLRQVLLDGKETIIGIGNGFGKDRAIKAVDDALMTPLFQSEIKNCQKVAILFQCDKRA

SEQ ID NO: 29265 - protein, 564 aa, Triticum aestivum
  misc_feature (26)..(26): Xaa can be any naturally occurring amino acid
MSSTRPTSSRRRRRRPTCRRQFLTPXLSTGYHFRPIKNWINDPNAPMYYKGWYHFFYQYNPKGAVWGNIVWAHSVSRDLINWVALETAIQPSIKSDKYGCWSGSATILRDGTPVIMYTGIDRADINYEVQNIAFPKNKSDPLLREWVKPRSNPIIVPEGGINATQFRDPTTAWYADGHWRLLIGALSGASRGVAYVYRSRDFMRWTRVRKPLHSAPTGMWECPDLYPVTVDGRQNGLDTSVTSSPKVKHVLKNSLDLRRYDYYTVGTYNRKTERYVPDNPTGDEHHLRYDYGNFYASKTFYDPVKRRRILWGWANESDTAVDDVAKGWAGIQAIPRKVWLDPSGRQLMQWPVEELEALRGKKPVSLRDGVVKRGEHVEVTGLRSSQADVEVSFEVPSLEGAEALDPALANDAQKLCSVKGADVEGGVGPFGLWVLASAKLEEKTAVFFRVFKAARNINSTKPVVLMCSDPTTSSLNPNLYKPTFAGFVDTDIAKGKISLRSLIDRSVVESFGAGGRTCILSRVYPTLALGKNAHLHVFNNGKVDIKVSQLTAWEMKKPALMNGA

SEQ ID NO: 29266 - protein, 190 aa, Paracoccidioides brasiliensis
MINQSETGLPSGWEVRHSNSKNLPYYFNPITKESRWEPPSNTDTEKLKEYMAQHHSGLAERNNAATGVTSAGVGSSSADGKIRASHLLIKHQGSRRPSSWREAEITRSKEEALEILRRHEESIRSGEKTLGDIAMSESDCSSARKRGDLGFFGRGEMQAEFEEAAFALEPGQVSGIVETASGVHLIERLQ

SEQ ID NO: 29267 - protein, 277 aa, Mycoplasma fermentans
MDLNAEDLEVKLKVIGVGGAGNNAINLMLDENLPNVGKLLVANSDRQDLVKSLCPNKILLGDSTRGFGAGGTPKVGRECALESIKEIQKSLENTDIVIISAGLGGGTGTGAAPVIAEAAKKMGILTVAVVTTPFELIEGKHKSLIAQEGLKKLSEVVDSYIVISNQKLVENYRNLPVQEAFKVSNYTLKNSIKIIRDIIFETGFINLDFNDIRQVLLDGKETIIRIGNGFGKDRAIKAVDDALMTPLFQSEIKNCQKVAILFQCDKRASLDDIETAK

SEQ ID NO: 29268 - protein, 658 aa, Pseudomonas syringae pv. syringae B728a
MCGITGFFGVKNKNLDETTVIKNMLSMIEHRGPDQAGYYVNNSMGLGTMRLSIIDLAAGIQPLSDGTGQYWISYNGELYNYIELRRRLQVLGHHFSTESDTEVVLRSWMEWGDEALEKFNGAFAFAIYDTVKDEVFIARDRFGKRPLFYTQTDGGYLFASEMKCFFGFPGFEFKFDEMSLSSILAHWTPLPSQTPFQGIRQLPPGSIMTLRGAQCEIRPYYALDFRAVDFDGTENEAKEEIRNTLEQAVKLRLRSDVPMGLYLSGGVDSSVLTSIAARIIKQKPLRTFSVEFEDKNLDESSDQQLVSALFSTKHERLIINHKDIVDNFSATVFHAEMPLFRTAPVPMYMLSKHVRSTGIKAILSGEGADEVFLGYNIFKETLLRSQWDTTDHDEKKRLLAKLYPYMKSFSEDNDSNLMGFYNAYAKEKIPGLFSHEIRFQNGRFASRLLKTKNDPFAGIQAWVAKDPVYSALSPTQKAQWLEFNTLLSGYLLSSQGERMGLAHGIENRCPFLDINVQKLASSINLRFDDGFTEKYMLRMAYDGILPGRIIHKAKTPYRAPDSGPFVEHALDYLNHLCESNALDAIELINPVFAKALIKKVVERTLAGGEDITVRDNQAFVYLMSLIELDKWFVKRQGAAYINPCRVDKLLVQAVDARH

SEQ ID NO: 29269 - protein, 365 aa, Anabaena variabilis ATCC 29413
MDNIFRFADELGPAKIIHIYEREADLKAIVVVDNIDCGPAIGGVRMATDVTTEEVFRLARAMTLKNAAADLPHGGGKSAILADPKQPLADKERLVRTFARAIRDVTEYIPGPDMGTDEQCMAWIKEEIGRAVGLPKAIGGIPLDEIGATGFGLSICAEIASKFCHLNLEGARIVIQGFGSVGKNAARFLTAKGALLIGAADSQGTLFNPLGIDVKQLIKLKNSGKSVISYPQGDKLDRDAVIDIECDIWIPAARPDIIHADNVDRLKTQLVISGANIPFTEAAERICHERNIIVVPDFIANAGGVICAAVEYDGGNQTTAFETIAKKIRYNTTLVLEQVAKTGKLPRQAAVELAQRRICLARQDI

SEQ ID NO: 29270 - protein, 288 aa, Idiomarina baltica OS145
MPAQLIDGKAIAANIRASVKTQIDERLNAGKRAPGLAVVLVGQDPASEVYVGNKRRACEQVGIRSFDYDMPSDTSQTALEQLIDELNDNPDVDGILLQLPLPAGLDATPILERIHPHKDVDGFHPYNVGRLAQRIPALRPCTPKGIITLLDSTQIDLHGLNAVVVGASNIVGRPMSLELLLAGATTTVCHRFTNDLEKHVRRADIVVVAVGKPEFIPGEWIKEGAIVIDVGMNRLNDGRLTGDVEFDTAVQRAGWITPVPGGVGPMTVASLIENTLQACVEYHDHTEA

SEQ ID NO: 29271 - protein, 421 aa, Coccidioides immitis RS
MADLQGRKVFKVFNQDFIVDERYNVTKEVGQGAYGIVCAASNVQTGEGVAIKKVTNVFSKKILAKRALREIKLLQHFRGHRNITCLYDMDIPRPDHFNEVYLYEELMECDLAAIIRSGQPLTDAHFQSFIYQILCGLKYIHSANVLHRDLKPGNLLVNADCELKICDFGLARGFSIDPDENAGYMTEYVATRWYRAPEIMLSFPSYTKAIDVWSVGCILAELLGGRPFFKGRDYVDQLNQILHYLGTPNEETLRRIGSPRAQDYVRNLPYMQKVPFQRLFPNANPEALDLLDRMLAFDPSSRISVEEALEHPYLQIWHDASDEPTCKTTFDFHFEVVEDVHDMRKMILDEVMRFRAHVRQPHIQMGNAGQQAAAQQTSVPIPEENIASWKQDEPRPQEAIHGGMQPNDLEASLQGGMDAMR

SEQ ID NO: 29272 - protein, 105 aa, Medicago sativa
MADVEDRCFVGGLAWATDNDALEKAFSQYGEIVDSKIINDRETGRSRGFGFVTFANEKSMNDVIEAMNGQDLDGRNITVNQAQSRGSGGGGGGRGGGGYGGGGGG

SEQ ID NO: 29273 - protein, 416 aa, Listeria innocua
MAVEKITMPKLGESVTEGTISSWLVKPGDTVEKYDAIAEVLTDKVTAEIPSSFSGTIKEILAEEDETLEVGEVICTIETADAGSSEPAEEVEQTETKAPEKQETKQVKLAEAPASGRFSPAVLRIAGENNIDLSTVEGTGKGGRITRKDLLQVIENGPVATKTEEPTNRAQEKAPTPAPVRSAAGDKEIPINGVRKAIAKHMSVSKQEIPHAWMMVEVDATGLVRYRNTVKDSFKKEEGYSLTYFAFFIKAVAQALKEFPQLNSTWAGDKIIEHANINISIAIAAGDLLYVPVIKNADEKSIKGIAREISELAGKARNGKLSQADMEGGTFTVNSTGSFGSVQSMGIINHPQAAILQVESIVKRPVIIDDMIAVRDMVNLCLSIDHRILDGLLAGKFLQAIKANVEKISKENTALY

SEQ ID NO: 29274 - protein, 246 aa, Oryza sativa
MVKEFVQDEEKQRLLLDEHTEKHFTAGEVVRDIIIGVSDGLTVPFALAAGLSGANAPSALVLTAGLAEVAAGAISMGLGGYLAAKSDADHYHRELQREQEEIDTVPDTEAAEIADILSQYGLGPEEYGPVVNSLRSNPKAWLEFMMKFELGLEKPEPRRALMSAGTIALAYVVGGLVPLLPYMFVPTADRAMATSVVVTLAALLFFGYVKGRFTGNRPFISAFQTAVIGALASAAAFGMAKAVQSI

SEQ ID NO: 29275 - protein, 218 aa, Arabidopsis thaliana
SLSFLAALSLFALTLPLVIASDPSPLQDFCVGVNTPADGVFVNGKFCKDPRIVFADDFFFSSLNRPGNTNNAVGSNVTTVNVNNLGGLNTLGISLVRIDYAPNGQNPPHTHPRATEILVVQQGTLLVGFISSNQDGNRLFAKTLNVGDVFVFPEGLIHFQFNLGGTPAVAIAALSSQNAGVITIANTIFGSKPDVDPNVLARAFQMDVNAVRNLQARF

SEQ ID NO: 29276 - protein, 345 aa, Mycobacterium tuberculosis
MGTQSPALSLNPMTVQADREVAMADAPTRATTSRVDSDLDAQSPAADLVRVYLNGIGKTALLNPAGEVELAKRIEAGLYAEHLLETRKRLGENRKRDLAAVVRDGEAARRHLLEANLRLVVSLAKRYTGRGMPLLDLIQEGNLGLIRAMEKFDYTKGFKFSTYATWWIRQAITRGMADQSRTIRLPVHLVEQVNKLARIKREMHQHLGREATDEELAAESGIPIDKINDLLEHSRDPVSLDMPVGSEEEAPLGDFIEDAEAMSAENAVIAELLHTDIRSVLATLDEREHQVIRLRFGLDDGQPRTLDQIGKLFGLSRERVRQIERDVMSKLRHGERADRLRSYAS

SEQ ID NO: 29277 - protein, 968 aa, Lupinus albus
MASNRNMEKMASIDAQLRQLAPAKVSEDDKLIEYDALLLDRFLDILQDLHGEDLKDTVQEVYELSSQYEGKHDPKKLEEIGNVITSLDAGDSIVVAKSFSHMLNLANLAEEVQISHRRRNKLKKGNFADETNATTESDIEETLKRLVFDLKKSPHEVFDALKSQTVDLVLTAHPTQSIRRSLLQKHARIRDCLSHLYAKDITPDDKKELDEALQREIQAAFRTDEIKRTPPTPQDEMRAGMSYFHETIWKGVPKFLRRVDTALKNIGINECIPHNAPVIQFSSWMGGDRDGNPRVTPEVTRDVCLLARMMAANMYYSQIEDLMFELSMWRCSDELRNRADELHRSSNKDEVAKHYIEFWKKVPANEPYRVVLGEVRDRLYQTRERSRHLLAHGYSDIPEEATFTNVEEFLEPLEVCYRSLCACGDRPIADGSLLDFLRQISTFGLSLVRLDIRQESDRHTDVMDAITKHLEIGSYLEWSEEKRQEWLLSELSGKRPLFGPDLPKTEEIRDVLDTFHVLAELPPDNFGAYIISMATAPSDVLAVELLQRECHIKHPLRVVPLFEKLADLEVAPAALARLFSIDWYINRIDGKQEVMIGYSDSGKDAGRFSAAWQLYKAQEELIKVAKKFGVKLTMFHGRGGTVGRGGGPTHLAILSQPPDTIHGSLRVTVQGEVIEQSFGEQHLCFRTLQRYTAATLEHGMNPPISPKPEWRALMDQMAVISTEEYRSIVFKEPRFVEYFRLATPELEYGRMNIGSRPAKRRPTGGIETLRAIPWIFAWTQTRFHLPVWLGFGAAFKQVIEKDVRNLHMLQEMYNQWPFFRVTIDLVEMVFAKGDPGIAALNDRLLVSKDLWPFGEQLRKKYEETKNLLLKVAAHKDLLEGDPYLKQRLRLRHSYITTLNVFQAYTLKRIRDPNFNVRPRHHISKESLEKSTSATELVSLNPTSEYAPGLEDSLILTMKGIAAGMQNTG

SEQ ID NO: 29278 - protein, 562 aa, Vibrio fischeri ES114
MNNNKRPLYIPYAGPALLSTPLLNKGSAFSTTERKYFNLEGLLPEAIESIEEQTGRAYKQYQNFENDMDKHIYLRNIQDTNETLFYRLVQNHISEMMPIIYTPTVGAACENFSNIYRRGRGLFISYENKNRIDDLLNNAANQNVKVIVVTDGERILGLGDQGIGGMGIPIGKLALYTACGGISPAHTLPIVLDVGTNNPQRLADPMYMGWRHPRVTGDEYADFVEDFIQAVQRRWPEALVQFEDFAQKNAMPLLERYKNRICCFNDDIQGTAAVTVGSLLAACKAAGSSLSEQRVTFLGAGSAGCGIAEAIIAQMVSEGISDAQARSQVYMVDRWGLLQEGMPNLLDFQQRLVQKAENTKDWVSEEPNFSLVDVMRNAKPTVLIGVSGAPGLFSKEVIQEMHKHCERPIVFPLSNPTSRVEATPNDIIRWTDGQALVATGSPFDPVAHNGQTYPIAQCNNSFIFPGIGLGVLAIKATRVTDEMLMESSRALAECSPLAIHGTGALLPPLEEIHSVSKRIAFAVAKKAIEQGHALEITDEALQQKIESYFWKPVYRRYKRTAF

SEQ ID NO: 29279 - protein, 395 aa, Treponema pallidum
MAKEKFARTKVHMNVGTIGHVDHGKTTLSAAITSYCAKKFGDKQLKYDEIDNAPEEKARGITINTRHLEYQSDRRHYAHIDCPGHADYVKNMITGAAQMDGGILVVSAPDGVMPQTKEHLLLARQVGVPSIIVFLNKVDLVDDPELLELVEEEVRDALAGYGFSRETPIVKGSAFKALQDGASPEDAACIEELLAAMDSYFEDPVRDDARPFLLSIEDVYTISGRGTVVTGRIECGVISLNEEVEIVGIKPTKKTVVTGIEMFNKLLDQGIAGDNVGLLLRGVDKKEVERGQVLSKPGSIKPHTKFEAQIYVLSKEEGGRHSPFFQGYRPQFYFRTTDITGTISLPEGVDMVKPGDNTKIIGELIHPIAMDKGLKLAIREGGRTIASGQVTEILL

SEQ ID NO: 29280 - protein, 321 aa, Vibrio fischeri ES114
MSNVKHSKLLILGSGPAGYTAAVYAARANLNPVMITGMQQGGQLTTTTEVENWPGGAADMTGPGLMEEMKAHAERFNTEIIFDHINETDFSQRPFRLKGDSGEYTCDALIISTGASAKYLGLESEEAFKGRGVSACATCDGFFYRNQKVAVVGGGNTAVEEALYLSNIAAEVHLIHRRDSFRSEKILIDRLMDKVENGNIILHTDRTLEEVLGDDMGVTGVRLKDTKSDATEDLEVMGAFIAIGHQPNTAIFNGQLDMENGYIKVKSGLEGNATQTSVEGIFAAGDVMDHNYRQAITSAGTGCMAALDAERFLDALEAKES

SEQ ID NO: 29281 - protein, 589 aa, Pseudomonas chlororaphis
YLDNNIKLLLNRKVVEIDRVKRRVIAEDGSEAEYDRLLIATGSTPFILPIPGNTLDGVIGYRDIADTQAMINTAKTHKHAVVIGGGLLGLEAANGLKLRGMDVTVVHLGEWLLERQLDKTSGQLLQTALENRGLKFRLSEQTQALHDAGNGRVGSVQFKNGDIIPADLVVMAAGIRPNTELAEKSGIPCNRGILVNDTMQTYDPRIYAIGECASHRGTAYGLVAPLFEQAKVCANHLAQLGFATYKGSVTSTKLKVTGIDLFSAGDFMGGEGTETITLSDPIGGVYKKLVIKDDVLVGACLYGDTADGGWYFRQIRENHAISEIRDHLMFGENALGDVGHQGQDKAMSMADSAEVCGCNGVCKGTIVKAIQEHGLFSVDDVKKHTKAASSCGSCAGLVEQILINTVGGAADVKPKSEKAICGCSDLNHGQIRQAIRDQHLLTIAGTMSYLNWRTPNGCATCRPALNYYLISTWPGEAQDDPQSRLINERAHANIQKDGTYSVVPRMWGGVTNPAELRRIADVADKYNVPMVKVTGGQRIDLLGIKKQDLPGVWKDLDMPSGHAYGKSIRTVKTCVGSEFCRFGTQNSTQ

SEQ ID NO: 29282 - protein, 223 aa, Pisum sativum
MCCSILHHRNPRREHEFPAVVTSPVTENHIFLGGAGERGLTINGTFIKFTCIGVYLEDKADKSLATKWEGKLEELLETLDFYRDIISGPFEKLIRRSKIKELSGPEYSRKVMENCVAHLKSVGTYGDAEVEAIQNLQKLSRMLIFHLVLLKKNRQSPDGILGLSSSKDISIPEKEDAIIENKAASSAVLETMIGEHAVSPDLKRCLAARLPALLNEGTFKIGN

SEQ ID NO: 29283 - protein, 316 aa, Kineococcus radiotolerans SRS30216
MPRTPQLSLPDLSGRRALVTGASDGIGFGIARRLAGAGAEVLLPVRNRTKGEAALARIREQHPTAKVTLHDLDLSSLSSVAALGDELRAEGSPIHLLINNAGVMTPPQRQTTVDGLELQLGTNHLGHVALVAHLLPLLRAGRARVTSQISVAARSGAVHWEDLNWEDSYHGMRAYSSSKIALGLFGLELDRRSRAEGWGITSNLSHPGVAPTSLLAARPELQRERNTPQIAVIRRLSRAGILVGTVDSAQLPALHAATAPQAQGGRLYGPTGPGNLGGGPGEQPLYRPLRDQTEADRVWTVSQALAGVSFTTTARI

SEQ ID NO: 29284 - protein, 479 aa, Synechococcus sp. CC9605
MTSTSTRDLVSQPYKYGFVTEIETDKIAKGLSEEVVRLISAKKEEPDFLLQFRLKAFRHWLTLEEPDWAALGYPKIDYQDIIYYAAPKQQEKKASLDEVDPKLLETFDKLGIPLSEQKRLSNVAVDAVFDSVSIATTYKEKLAEHGVVFCSFSEAVKEHPELIERYLGTVVSSNDNYFAALNSAVFSDGSFVFIPKSVECPMELSTYFRINSGDTGQFERTLIVAEEGASVSYLEGCTAPMFDTNQLHAAVVELVALDDASIKYSTVQNWYAGDENGVGGIYNFVTKRGQCRGDRSRISWTQVETGSAITWKYPSCVLQGADSVGEFYSVALTNNCQQADTGTKMVHVGPRTRSTIVSKGISAGRSSNSYRGLVQMGPNAKGARNYSQCDSMLIGDQAAANTYPYIRSQQPQAAIEHEASTCRISEDQLFYLQSRGIGFEEAVSMMVSGFCRDVFNQLPMEFAAEADKLLALKLEGSVG

SEQ ID NO: 29285 - protein, 272 aa, Streptococcus agalactiae
GAILVVASTDGPMPQTREHILLSRQVGVKHLIVFMNKVDLVDDEELLELVEMEIRDLLSEYDFPGDDLPVIQGSALKALEGDEKYEDIIMELMSTVDEYIPEPERDTDKPLLLPVEDVFSITGRGTVASGRIDRGTVRVNDEVEIVGIKEDIQKAVVTGVEMFRKQLDEGLAGDNVGVLLRGVQRDEIERGQVLAKPGSINPHTKFKGEVYILSKEEGGRHTPFFNNYRPQFYFRTTDVTGSIELPAGTEMVMPGDNVTIEVELIHPIAVEQ

SEQ ID NO: 29286 - protein, 297 aa, Brassica napus
  misc_feature (138)..(138): Xaa can be any naturally occurring amino acid
  misc_feature (173)..(173): Xaa can be any naturally occurring amino acid
MGNVNARDEANSVHNNNNASPLEDNDGEIHSRHHHQPLSSDTAPPPPPELMGQSPPQSTRPTHNLLSYRLLRYRDFIFSDQLKSTSQTLRASRPLPTNRLSPHQCIPHLEDMPLLRPDEIHIRKPSWVLLAPSKSASXEKGIPTMITWCHGGKEISVEGSWDNWKSRTRLQDXGEDYAAMNTFNLLDLQDYVPEDIQSISGFEPPQSPEASYSSLLLGAEDYSKEPPLVPPHLQMTLLNLPPANPDVPSPLPRPQHVVLNHLYMHKGKSGPSVVALGSTNRFLAKYVTVVLYKSLQR

SEQ ID NO: 29287 - protein, 159 aa, Plantago major
MLQRIGIGLVLSLVSIVYAAIIERKRLATAMEYGLVDMPKAVVPMSALWLAPQYVLSGVADVFTMIGLQEFFYDQIPCDLKSIGLAMYLSILGIGSLLSSFLVSFIQNMTKGHGQDGWFADNLNKAHLDYFYWLLAGLSTVGLSAYIYFARSYVYRRKV

SEQ ID NO: 29288 - protein, 443 aa, Shewanella oneidensis MR-1
MSQQKPGLKQSLNLWQVVVMGLAYLTPMAVFDTFGIVSEITSGHVATSYLLALAGILFTAFSYGHLVRKYPYAGSAYTYAQKNFSPNVGFMVGWSSLLDYMFMPMINMLLAKIYLTAMFPNVEPWIFIFGLVTVMTVLNLRGIDLVANFNGVIVFAQIAIILVFIGLMAHSLSLGEGEGVIASVRPFYSEQVTLAPLFTGATILCFSFLGFDGLSSLSEETKDAKRVIPRAILLTALIGGVIFVSVSYFLQLYFPDISRFEQLDAVLPEIALYVGGNLFQSIVLVATTIAVLASGMAAHAGVARILYVMGRDNMLPNKGFGYVHPKWRTPAFNVVLVGLLALSAVSFDLEMALALVNFGALVAFTFVNLSVIVQFYIKEKRNQSLKEHLQYFVLPLCGAATIGVLWINLEPQSLELGLIWGAVGMLYLALRSLRLRKAVELQS

SEQ ID NO: 29289 - protein, 450 aa, Robiginitalea biformata HTCC2501
MADYKDKIDAFMEEVTSRNGHEPEFIQAVQEVAETVIPYIAEQEIYSGKNILLRMVEPERLISFRVAWVDDDGEIHVNRGYRIQMNSAIGPYKGGLRFHPSVNASILKFLAFEQVFKNSLTTLPMGGGKGGSDFDPKGKSDDEVMRFCHAFMTELCRHIGPNTDVPAGDIGVGAREIGFLFGMYKKIRNEFTGVLTGKGLSWGGSKIRPEATGYGTVYFAQNMLETRNDSIEGKTVAVSGSGNVAQYAAEKVLQLGGKVVTLSDSGGHIHDPDGIDAEKLAWVMDLKNNRRGRISEYVKQYPGASYHKGKAPWHVACQVALPCATQNELNGEDAKTLIKNGCICVAEGANMPSTPEAIHAFHDARILFAPGKASNAGGVATSGLEMSQNSLRISWTREEVDQRLKGIMSDIHDSCIEYGREDDGYCNYVKGANIAGFVKVADAMLAQGVI

SEQ ID NO: 29290 - protein, 113 aa, Shigella flexneri 2a str. 301; identical to SEQ ID NO: 677

SEQ ID NO: 29291 - protein, 670 aa, Oryza sativa
FNTLFQWVYYSCVVVVVVDQEPRSPGKKFYLFRPFGLVCQSRSQWRDLVSTPFASFCCQFALREEGDSAAEESGVSPAMAAALECWSGRPSTDEEMVEQVLMKPHVRSDDSLPTCADAAFAAGEPTTAQAAPKKWQRLGRNFAGAIAAFKSSLNLDNGSLPRDPSPRAVGERPPLLVRGFQQLYSRGGATQQLPEKLVADLRRHFDALPNSYAQAGFDMKDVLLHARLVEQAAGEDQPAVSIEEVPGSNGRGGANEGTVFQLTFACSAPLSWQSMSGSLDSPSFCCKRIQIFEKRGLTLGVVMILVQPGNEVFFKNRVDAALKSAIKKQRKNSGGVKLPFGLCGCQEEGSRNFDEESMFDPDDGQVLDNEPTCKPQLPTPLPQSSVFVSIDEWQTIRSGGEELGRWMLSSEEIEFIDWVGPNSFKGVFRGRKVWVNKMRGCDMGSAYDVEIRQDLLQLMSCGQRNILQFHGICFNENHGLCIITRMMEGGSVHDIIMQRSKRLSLRDILKIAIDVAEGLAFMNSYAITYRDLNARRILLDRQGNACLGDMGIVTPCNNAGEVTEYETSGYRWLAPEIIAGDPESVSETWMSNVYSYGMVLWEMVTGEEAYSTYSPVQAAVGIAACGLRPEIPRDCPHFLRSLMTRCWDNNPLKRPQFSEIISMLQRQNVR

SEQ ID NO: 29292 - protein, 340 aa, Candidatus Kuenenia stuttgartiensis
MEKPADKSEKKAPASQFEKTWVSTFPRVCEGCSQLTNKQFFLINPVLKITTIGTFIKNANAKFVLSKIIVEDFYEGEIYLLLSLKLAITIGNILLLLEDEAIKENANKENFDADCADGFKEFSNQVCGILDNDLRLKLPKPIHLKLLSVEPINKENMTTVLKDDILNEECLFLSTSLRIMGFDDDQFIICVPKLIGEEFFGEIIEEENKEYRGTILAVDDSNTDLRIIRKLLGNDYKVLVTDNPGHALSTLGKTNIDLVLMDIYMPGVDGITLCERIKRNAMVEDVPIIICSAHPTQENVIRAVRAGAADFIVKPVTRQKLMEKINKHMLNKSLKIPANR

SEQ ID NO: 29293 - protein, 138 aa, Shorea pilosa
EKNIPVLLGLLSIWNVSFLGYPARAILPYSQALEKFAPHIQQVSMESNGKGVSIDGMPLPYEAGEIDFGEPGTNGQHSFYQLIHQGRVIPCDFIGSAKSQQPIHLKGEVVSNHDELMSNFFAQPDALAFGKTPEELHK

SEQ ID NO: 29294 - protein, 318 aa, Plantago major
MATFPVVNMENLNGDERSSTMDIIKDACENWGFFELVNHGIAPEFMDTVEKLTKDHYRRSMEQRFNEMVANKGLEAVQSEIEDLDWESTFFLRHLPVSNISEIPDLQDEYRKVMKEFASQLEKLAEVLLDLLCENLGLEKGYLKKAFYGSKGPTFGTKVSNYPPCPKPDLIKGLRAHTDAGGIILLFQDDKVSGLQLLKDGEWVDVPPMRHSIVINIGDQLEVITNGKYKSVMHRVLAQTDGSGRMSLASFYNPGSDAVIYPAPALVEKEDSKDLYPKFVFEDYMKLYSGVKFQAKEPRFEAFKAMESNATVGPIATA

SEQ ID NO: 29295 - protein, 534 aa, Debaryomyces hansenii CBS767
MKITTLVASILMSVLLEPVIASFIDTGKDTSAYNRPLIHLTPNVGWLNDPNGLFYDKKTSVWHAYYQYNPNDTIWGQPLYWGHSSSKDLTHWEEHQVALGPQNDDEGIFSGSIVIDYNNTSGFFDESIDKDQRVVAIYTNSIPDTQTQDIAYSLDGGETFTKYKKNPVIDVNSTQFRDPKVFWHEETNKWIMVVLKSQEYKIQIFGSLDLKTWDLHSNFTSGYLGNQYECPGLIKVPIENTNDYKWVMFLAINPGSPAGGSSNQYFIGEFDGFEFKQDDSITRVMDAGKDFYAFQTFSDNEQDVIGLAWASNWQYANVVPTNPWRSSMSLARKYTLGYVNQNVETKIMTLIQTPILNNLDVINKVEKNNHLLTKNDSVITNFSSSTGLLDFNTTFKVVGESIDSNSLSNIEILIHSQMSNSSTESIKVGFDRSVSAFYFNRDIPNVEFNNNPYFTNKFSTYVEPSHYDEDDMPVYKIYGIVDKNILELYFNDGTQTMTNTFFMSEDKYPHQIEIASNVDGQFELQSLLIRELNN

SEQ ID NO: 29296 - protein, 496 aa, Nicotiana attenuata
MSTLMAKMMSGSTPTNPGSTGTSSPSLTPPPASLPVRTIPGGYGWPLLGPISDRLDYNWFQGPNTFFTKRIEKHKSTVFRTNVPPCFPFFLGVNPNVVAVLDVKSFSHLFDMEIVEKANVLVGDFMPSVKYTGDMRVCAYLDTSEPKHTQIKNFSLDILKRSSKTWVPTLVNELNSMFETFESDISKSNSASLLPTMQKFLFNFFSLSLLGANPSASPEIANSGYVMLDTWLAIQLAPTVSIGLLQPLEEIFVHSFNYPFFLVKGSYEKLIQFVKNEAKEVLNRGKSEFGLTEQEAIHNLLFILGFNAFGGFSIFLPTLLGNLGDEKNAELQEKLRNEVREKVGLKTENLSFESVKEMELVQSFVYETLRLSPPVPSQYARARKDFKLSSHDSVYEIKKGELLCGYQPLVMRDPKVFDDPEKFVLERFTKEKGKELLNYLFWSNGPQTGRPTESNKQCAAKDVVTLTASLIVAYIFQRYDSVSFSSGSLTSVKKAS

SEQ ID NO: 29297 - protein, 649 aa, Bradyrhizobium japonicum USDA 110
MFGLPLRCRAGLSALVVLTSQLVANAALASDFGLGRAHPTGQVAQGWELAQAEDDHAAHHPAASGSAGGAAGAPPGGATPGMMGGMDGMMGRPRKEFYPALMEMPSLSAEQRSNLEIQARERISAETDRLAGAEMDLRHAIAGSDIVAADQAARRLRESLNAVQSGVVALRSLHEGKPPQQIAQAWFKSQMNLLPQRGAMDADDGTPGVSWFHVTTMALLVLFSLAMLAVYLARMRRANALVDRLTRAAVAPAAAAPLVSPPAAGVPNDKPEATSSQETDRHPRRVEASRSWKGKLRICAIYQETPNVKTFRLQAPDGGAIPFAFLPGQFLTYAIEIDGQAVRRSYTIASSAAQTAYVETTIKREDGGLLSDYMHGHLKEGDLVEVAGPSGAFTFTGVEADSVVLIGGGVGITPLMAAIRYLSDIAWPGQIYLVYGAQTTEQFIFRDELEYLQRRMSNLHVAATMVRAAGTSWMGSEGQITAEFLTQAVPDLARRRVHLCGPPGMMDALRKTLIGLGVPREQIKTEAFGPARGAVPPPGKVAAEAQMPAAEASNRGAATVGPATATIRFATSDKVVALPPDKSVLEVAESAGVSIDYSCRVGVCGVCKTHLLQGNVTMEVQDALTADDKANGLILACQARSVGDLVVEA

SEQ ID NO: 29298 - protein, 306 aa, Adonis palaestina
AISVFSTSYSFHKNLLLHSKQDILNRPCLLFSPVVVESPMRKKKTHRAACICSVAERTRNLDIPQIEEEEENEEELIEQTDSGIIHIKKTLGGKQSRRSTGSIVAPVSCLGILSMIGPAVYFKFSRLMECGDIPVAEMGITFAAFVAAAIGTEFLSGWVHKELWHDSLWYIHKSHHRSRKGRFEFNDVFAIINALPAIALINYGFSNEGLLPGACFGTGLGTTVCGMAYIFLHNGLSHRRFPVGLIANVPYFHKLAAAHQIHHSGKFQGVPFGLFLGPQELEEVRGGTEELERVISRTAKRTQSST

SEQ ID NO: 29299 - protein, 306 aa, Adonis palaestina
AISVFSSGYSFYKNLLLDSKPNILKPPCLLFSPVVIMSPMRKKKKHGDPCICSVAGRTRNLDIPQIEEEEENVEELIEQTDSDIVHIKKTLGGKQSKRPTGSIVAPVSCLGILSMIGPAVYFKFSRLMEGGDIPVAEMGITFATFVAAAVGTEFLSAWVHKELWHESLWYIHKSHHRSRKGRFEFNDVFAIINALPAIALINYGFSNEGLLPGACFGVGLGTTVCGMAYIFLHNGLSHRRFPVWLIANVPYFHKLAAAHQIHHSGKFQGVPFGLFLGPKELEEVRGGTEELERVISRTTKRTQPST

SEQ ID NO: 29300 - protein, 464 aa, uncultured archaeon GZfos26D8
MQRRIVSFFPLFSRLFRFHLFSIIKVFKYKRMRDLWGLMREYDIVVVGGGPAGCMAAKYAAKAGASTLIIEENSAIGEPVQCAGLISKRAIEESELKNIGSFVNCELKGAIVHSQSHELRIESPSPDKSAFAIRRDIFDKELAKAAMDEGADLILNSKVKHVKRGRERDGAKLTILAAATTTNVGVNLEENEIKANVVIGADGWRSGIARMAGVGDGLTVTKNFLNCVQIEGQYEIHEPVADIFVGKTIAPGFFAWVIPIGETTARIGLCIDKRFSPHPNPLPFLKRILSEHPVIAKKYKFGAQSQFTAGAIPIPTERQKTVKTEEGTGILLVGDAAAQVKPITGGGVYYGMKCGKIAGEAAARACLERNMELLNGYEKRWQEEIGAEMAFGLKIHRLRCVFSDKDFDRMCQALSKYDMIQRITNRGDMDYPSFVFRELLKNPGIIMLMAKNIIKYLYAERKIR

SEQ ID NO: 29301 - protein, 612 aa, Bradyrhizobium japonicum USDA 110
MCGIAGIVNLRGSAVEPDDISRLTGLIAHRGPFGQGTWFSADRSLAFGHRRLAIIDPGEGGYQPMRSADGRHVIVFNGEIYNFLELRRELEAQGVVFRSQSDTEVILAAWQAWREDMLPRFNGMWALAIFDTATGELFLARDRFGIKPLLYAVSPERFIFASEQRALVRSGLIDASVDVEVARRLLLDAFGIEGSERTLFRQVRRLQGGHCMWLRQGKVSVRRWWRTVDHLPPVPGTEAEQVARFRELFQDAVALRMRSDVPIGTCLSGGFDSSAVICTMAAHEKAGMGPRDSTAWRHAFVATFPGALNDERPMAEEAAAWAEVAPTFLEIGQADALIDLDQILDDLDDVYIALPSAIWLIYRQLRRQDVTVSLDGHGADELMGGYLQQGQALAFRIRNAAEDFASRSALARRSVDVLRMLALKRRGVYFLRGGLRDLPASLPLVAEDDVLPREWGGLNRRLYRMFHSTVLPTILRNFDRLSMAHGVEVRMPFMDWRLVTYTMALPESSKSSEGYTKAVARRAMANLMPESIRTARRKVGFNSPMPEWLNGPLAGWTADLLDRKVPAFAELVDEAALRTTVSRLTASKSWDWEAVGRIWPYLNMKWMLARYA

SEQ ID NO: 29302 - protein, 428 aa, Leptospira interrogans serovar Copenhageni str. Fiocruz L1-130
MKQDSQSENESIVRDLSVSEDQRNVKFFSDLQTPIPKHLPFFMDVTLRDGNQALRRPWNLEQKETIFKQLLKLGVQGIEVGFASSNNQEFEACKYLSSIAPDNVVISSLSRAVEKEIEVSWKAIRFAPKPRIHIVYPVSAFTIQNVLKITPEKVLDRISQSVAYAKSLVGSKGEVQFSGEHFGDSLENLDFAAEAFQIALNNGADVVNLPNTVERYRPWLFVSMVKAVANLLPEDTRISIHTHNDLGMATATTVESYFAGAVQLETALNGLGERAGNTNTYEVAIALHNCGVEVPLNFSTIYETSRLVSYLSEIPIYEKAPLIGEDVISHRSGIHQDGVAKTRHLQKGAYRAFDAALIGRPEGDRIEFTNQSGKSAVYCILKDAGENITLEEAGRLQPILKKISEDLGRRELTLEEIRIEWNRLLRAI

SEQ ID NO: 29303 - protein, 239 aa, Elaeis oleifera
NFCILNAANHIIRGEADVMLCGGSDAAIIPIGLGGFVACRALSQRNSDPTKASRPWDIDRDGFVMGEGAGVLLLEELEHAKQRGANIYAEFLGGSFTCDAYHMTEPHPEGAGIALCIENALAQAGVAKEDVNYVNAHATSTPAGDLKEYQALIRCFGQNPELRVNSTKSMIGHLLGASGAVEAVAAIQAIRTGWVHPNVNLENPMKKGVDINVLVGSRKERLDVKVALSNSFGLVVITH

SEQ ID NO: 29304 - protein, 359 aa, Mannheimia succiniciproducens MBEL55E
MVIMTHKIAVIPGDGIGIEVINEGVKVLNCVSQLDPKIQFEFTHFPWGCEFYSKTGRMMDDDGIERLSKFDGIFLGAVGYPGVPDHISLWGLLLRIRKSFDQYVNVRPVKLLKGAPCPLKEKSPKDINMIFIRENSEGEYAGSGSWLYRDKPNEVVIQDGVFSRVGCERIIRYAFELARTEKKSLTSISKGNALNYSMVFWDQIFQQLSQEYPDVETHSYLVDAAAMLMITKPERFEIVVTSNLFGDILTDLGAAIAGGMGLAAGANLNPEGNFPSMFEPIHGSAPDIAGKQLANPLATVWSASQLLEFFGYKEWAARLIDAIEYLLVEQKTLTPDLGGTAKTADVGDAVVAYLQKHFA

SEQ ID NO: 29305 - protein, 302 aa, Pseudomonas chlororaphis
MPAQGRPAVPRFGLRQARGLPAAQLADRPGNRPGPGPGRGLRPSPFGPGRKRPGAAGPAGRKLMDRQITASTCCYCGVGCGVLIEHDGERILGVSGDPAHPANFGKLCSKGSTLHLTGDLAARALYPELRLGKGLARARSDWDSALDHAASVFAETIAEHGPDSVAFYISGQLLTEDYYAFNKLARALVGTNNIDSNSRLCMSSAVVGYKRSLGADAPPCSYEDLELSDCVMIVGSNMAYAHPILFRRLEEAKSRRPQMKIIVIDPRRTDTCDLADLHLAILPGTDVALFHGILHLLLWEDW

SEQ ID NO: 29306 - protein, 335 aa, Brucella melitensis biovar Abortus
MAVRVAINGFGRIAVTILRAIVESGRTDIQVVAINDLGPVETNAHLLRYDSVHGRFPKEVEVAGDTIDVGYGPIKVHAVRNPAELPWKEENVDIALECTGIFTSRDKAALHLEAGAKRVIVSAPADGADLTVVYGVNNDKLTKDHLVISNASCTTNCLAPVAQVLNDTIGIEKGFMTTIHSYTGDQPTLDTMHKDLYRARAAALSMIPTSTGAAKAVGLVLPELKGKLDGVAIRVPTPNVSVVDLTFIAKRETTVEEVNNAISEAANGRLKGILGYTDEKLVSHDFNHDSHSSVFHTDQTKVMEGTMVRILSWYDNEWGFSSRMRDTAVALGKLI

SEQ ID NO: 29307 - protein, 275 aa, Streptococcus anginosus
GAILVVASTDGPMPQTREHILLSRQVGVKYLIVFMNKVDLVDDEELLELVEMEIRDLLSEYDFPGDEIPVIQGSALKALEGDEKYEDIIMELMDTVDEYIPEPERDTDKPLLLPVEDVFSITGRGTVASGRIDRGTVKVNDEVEIVGIRDEIQKAVVTGVEMFRKQLDEGLAGDNVGVLLRGIQRDEIERGQVLAKPGSIHPHTKFKGEVYILTKEEGGRHTPFFNNYRPQFYFRTTDVTGSIELPAGTEMVMPGDNVTIDVELIHPIAVEQGTT

SEQ ID NO: 29308 - protein, 219 aa, Brassica napus
  misc_feature (172)..(172): Xaa can be any naturally occurring amino acid
  misc_feature (200)..(200): Xaa can be any naturally occurring amino acid
  misc_feature (208)..(208): Xaa can be any naturally occurring amino acid
VDPRVRADLENAPASVARLFSIEWYRNRINGKQEVMIGYSDSGKDAGRLSAAWQLYKTQEELVKVAKEYGVKLTMFHGRGGTVGRGGGPTHLAILSQPPDTIHGQLRVTVQGEVIEQSFGEEHLCFRTLQRFTAATLEHGMNPPVSPKPEWRVLMDEMAVIATEEYRSVVFXEPRFVEYFRLATPELEYGKMNIGSRPSXRKPSGSIXSLRAIPWIFAW

SEQ ID NO: 29309 - protein, 144 aa, Vibrio fischeri ES114
MSQFQTRCPSCHGLNRLPTERVNDGATCGRCKEPLLDGKPVEGTMDNLAALLNSDKAVVIDFWAPWCNPCVGFSPVFEDVAAERNGQIRCIKVNTEAEQQIAAQYQIRSIPTIMVFKNGQRVDMINGALPKGQFDQWLNQALLK

SEQ ID NO: 29310 - protein, 275 aa, Streptococcus bovis
GAILVVASTDGPMPQTREHILLSRQVGVKHLIVFMNKVDLVDDEELLELVEMEIRDLLSEYDFPGDEIPVIQGSALKALEGDTHYEDIIMELMNTVDEYIPEPKRDTDKPLLLPVEDVFSITGRGTVASGRIDRGTVKVNDEVEIVGIRDDIQKAVVTGVEMFRKQLDEGIAGDNVGVLLRGIQRDEIERGQVLAKPGSIHPHTKFKGEVYILTKEEGGRHTPFFNNYRPQFYFRTTDVTGSIELPAGTEMVMPGDNVTIDVELIHPIAVEQGTT

SEQ ID NO: 29311 - protein, 489 aa, Desulfitobacterium hafniense DCB-2
MNTIHTPKTKRVLTYNREYFYVTSVTLIGTEDGKLKQRRLGGKLNMTYVQEVLEQAVKRNPGEAEFHQALREVLESLEPVLEKRPDLKEAGILERIVEPERQILFRVPWVDDQGKVQVNRGFRVEYNSAIGPYKGGLRFHPSVYLGIIKFLGFEQIFKNSLTGLPIGGGKGGSDFDPKGKSEGEIMRFCQSFITELYRYLGADTDVPAGDIGVGGREVGYMFGQYKRITNRYEGVLTGKGLTFGGSLGRTEATGYGLVYFMEEALKAVGKSFSGATVVVSGSGNVAIYATQKATQLGGTVVAMSDSNGYIYDKDGINLDTVRQLKEVERKRLKDYVSIHPTAEYYEGCAGIWTIPCAIALPCATQNELDGEAAEVLVKNGCYAVGEGANMPSTPEAVDVFLQHKIIYGPGKAANAGGVAVSALEMSQNSMRYSWTFEEVDAKLKNIMVNIYHNASKAAQEFGFEGNLVAGANIAGFLKVAEAMKAQGTV

SEQ ID NO: 29312 - protein, 274 aa, Streptococcus constellatus
AILVVASTDGPMPQTREHILLSRQVGVKYLIVFMNKVDLVDDEELLELVEMEIRDLLSEYDFPGDEIPVIQGSALKALEGDEKYEDIIMELMDTVDEYIPEPERDTDKPLLLPVEDVFSITGRGTVASGRIDRGTVKVNDEVEIVGIRDEIQKAVVTGVEMFRKQLDEGLAGDNVGVLLRGIQRDEIERGQVLAKPGSIHPHTKFKGEVYILTKEEGGRHTPFFNNYRPQFYFRTTDVTGSIELPAGTEMVMPGDNVTIDVELIHPIAVEQGTT

SEQ ID NO: 29313 - protein, 231 aa, Rhodopseudomonas palustris CGA009
MHPLHRENHLINRIGWLRAAVLGANDGIISTASLVVGVAAAATSSEEVLLAGVAGLVAGAMSMAAGEYVSVSSQSDTEQADLARERKELADAPDSELDELTKIYVDRGLEPALARQVAEQLSAKDVFAAHARDELGLSAHVVARPVQAALTSALTFSVGAALPIGIVLLAPTGSTSMVVSGGSLICLAILGAVSAHIGGAGLLKPTLRVTFWGALAMAASAAIGALVGHTI

SEQ ID NO: 29314 - protein, 274 aa, Streptococcus criceti
AILVVASTDGPMPQTREHILLSRQVGVKSLIVFMNKVDLVDDEELLELVEMEIRDLLSEYDFPGDDIPVVQGSALKALEGDTAAEDKIMELMDIVDDYIPEPKRDTDKPLLLPVEDVFSITGRGTVASGRIDRGTVKVNDEVEIVGIKDEIQKAVVTGVEMFRKQLDEGLAGDNVGVLLRGIQRDEIERGQVLAAPGSIHPHTKFKGEVYILSKDEGGRHTPFFNNYRPQFYFRTTDVTGSIELPAGTEMVMPGDNVTIDVELIHPIAVEKGTT

SEQ ID NO: 29315 - protein, 452 aa, Novosphingobium aromaticivorans DSM 12444
MRYLPLTDADRSAMLSVVGAGSVDELFADVPAEARLSAPIAGLPNHASEMAVERHMARLSANNVTAGSVPFFLGAGAYRHHVPATVDHMIQRGEFLTAYTPYQPEIAQGTLQVLFEFQTQVARLFGTDVANASLYDGSTACWEAIAMAGRITKRGKALLSGGLHPHYVETARTMARFTGDVLDTSAPVLTAAPDDDALVARIDGETSCVVVQYPDILGRIPDLAKIAAAAQAQGALLITVVTEPVALGVLQSPGSLGADIVVGEGQSLGVGLQFGGPYLGLFGCREKYLRQIPGRLCGETVDADGKRGFVLTLSTREQHIRREKATSNICTNSGLCALAFSIHLTLLGGSGLADMARLSHLAARKTAAALAQVSGIEVVNSHFFNEFTVALPHDARQIVRDLADRHVLGGVSLGRLYPQEAALANGMVVAATECTTDEDIAALVAALKEVLA

SEQ ID NO: 29316 - protein, 223 aa, Brassica napus
MFVSFLDVIYLTSLFFILLSVSQERTMAVGDLSSSSSSSSSQELHVLAVDDSFVDRKVIERLLRISACKVTTVESGTRALQYLGLDGDNGSSALKDLKVNLIVTDYSMPGLTGYELLKKIKESSAFREIPVVIMSSENIQPRIEQCMTEGAEDFLLKPVKLADVKRLTELIMRRGEPQEEDKAKHSYPNRILQNNTDSSSSAHDYVSSVYDDTPSSKRMKLES

SEQ ID NO: 29317 - protein, 138 aa, Shorea rubella
EKNIPVLLGLLSIWNVSFLGYPARAILPYSQALEKFAPHIQQVSMESNGKGVSIDGVPLPYEAGEIDFGEPGTNGQHSFYQLIHQGRVIPCDFIGSAKSQQPIHLKGEVVSNHDELMSNFFAQPDALAFGKTPEELHK

SEQ ID NO: 29318 - protein, 98 aa, Oryza sativa (japonica cultivar-group)
MYRGRFASSELMTIAGGFVSSLLFLFLLTFIGNYQEANGVKTGWGAVVVAELTALIVAGTVHRVCITTCFLFSAGFLYEVDKLSGMILAKSESKARRH

SEQ ID NO: 29319 - protein, 598 aa, Neisseria meningitidis MC58
MNTVSNYLSALREAMKAQGLDALVIPSADPHLSEYLPEHWQARRELSGFTGSVGTFVLTTDEAGVWVDSRYWEQAAKQLAGSGIVLQKSGQVPPYNEWLAASLPENAAVGIPSDMVSLTGKRTLAQSLAAKNIRIEHPDNLLNQVWTNRPALPAETVFIHDPDYVSETAAEKLARVRAVMAEKGADYHLVSSLDDIAWLTNLRGSDVPFNPVFVSFLLIGKDNAVLFTDRCRLNAEAAAALQTAGIAVEPYAQVADKLAQIGGVLLIEPNKTAVSTLVRLPESVRLIEGINPSTLFKSCKSEADIARIREAMEHDGAALCGFFAEFEDIIGNGGSLTEIDVDTMLYRHRSVRPGFISLSFDTIAGFNANGALPHYSATPESHSTISGNGLLLIDSGAQYKGGTTDITRVVPVGTPSAEQKSDNTLVLKAHIALAEAVFPENIPSPLIDAICRKPLWQAQCDYGHGTGHGVGYFLNVHEGPQRIAFAAPATPETAMKKGMVTSIEPGLYRPGKWGIRIENLAANQAVAAPQETEFGSFLCFETLTLCPIDTRLMDTALMTDGEIDWVNRYHAEVRRRLEPLTEGAAKAWLIKRTEPLAR

SEQ ID NO: 29320 - protein, 552 aa, Synechococcus sp. CC9605
MTASAPAQPTQRQVHLDAPFSDQKPGTSGLRKSSRQFEEPHYLESFIEASLRTLPGVQGGTLVLGGDGRYGNRRAIDVILRMGAAHGLSKVIVTTGGVLSTPAASNLIRQRKAIGGIILSASHNPGGENGDFGVKVNGANGGPTPASFTDAVFECTKTLEQYTIVEAPVIPLDAPGLHSIGAMQVEVIDGVEDFVALMQELFNFDQIRDLIRNDFPLAFDAMHAVTGPYATRLFEELLGAPAGSVRNGTPLEDFGNGHPDPNLTYAHDLAELLLEGDDYRFGAACDGDGDRNMILGQRCFVNPSDSLAVLTANATMVPAYANGLTGVARSMPTSAAVDVVAKELGIDCFETPTGWKFFGNLLDAGKITLCGEESFGTGSNHVREKDGLWAVLFWLQILAERRCSVAEIMEEHWKRFGRHYYSRHDYEAVASDAAHDLYDRLESMLPSLVGQAFAGRKISTADNFSYTDPVDGSVTTGQGLRILLDDGSRVVVRLSGTGTKGATIRIYLESYVPNSGDLNQDPQIALAEMISAINDLAEIRQRTGMDRPTVIT

SEQ ID NO: 29321 - protein, 138 aa, Shorea rubella
EKNIPVLLGLLSIWNVSFLGYPARAILPYSQALEKFAPHIQQVSMESNGKGVSIDGVPLPYEAGEIDFGEPGTNGQHSFYQLIHQGRVIPCDFIGSAKSQQPIHLKGEVVSNHDELMSNFFAQPDALAFGKTPEELHR

SEQ ID NO: 29322 - protein, 259 aa, Magnetospirillum magnetotacticum MS-1
MSDVIQLVRDGAIATVTLNRPDRMNALNLPMWRGLAEAFEAISADKSIHVVILRGAGTKAFAPGADIEEFDTLRATPDQAKAYDLVMRKALDTVRACPQPVIAAIWGPCVGGGLELACCCDIRLSAKSGKFGVPINKISVVMAYPELAQIRRVAGPAAALEILLEGRIMEAEEALSKRLVNRVVDDEALEAELAATAKRIAAGAPLANRWHKAFIARLDDPTPVSEAELDECYRFLDTKDYAEGLAAFRAKRKPVFTAE

SEQ ID NO: 29323 - protein, 184 aa, Pseudomonas syringae pv. syringae B728a
MMKLRFFSIPLLLLAMSGAAMAADCPPLLQGELPKLRAKENIDLCKRFAGKPLVVVNTASFCGFAPQFKGLEALSQRYKGQGLEVLGVPSNDFKQEAKDGEETAKVCYVNYGVTFTMTEPQAVRGDDATHLFKVLAEQSSAPRWNFYKYVVDRQGKVIANFSSMTKPDDPELIAAIEKAIASKP

SEQ ID NO: 29324 - protein, 119 aa, Arabidopsis thaliana
  misc_feature (70)..(70): Xaa can be any naturally occurring amino acid
MAGVMKVVCLLLACMIEAGPITSKAALSCGSNNIDLASRIGYVLQGGVIPPACCSGVRNLNSIGKTTPDXRQLACNCIQGAARALGSGLNAGRATGIPRACGVNIPYEISTSTNCKTVR

SEQ ID NO: 29325 - protein, 390 aa, Rubrobacter xylanophilus DSM 9941
MVEAIRLSLPPLLPAGSSENYSTAPTGVPELVSPPRRRSLYLGVPFGRERRQHPVARTVTLIPGDGIGPEVTGSAKEVIGALGVDIEWEIAEAGETVMEREGTPLPEYVLESIRRNKVALKGPLTTPVGTGFRSVNVALRKELDLYANIRPALSLPGLDLPYRDIDILLFRENTEDLYAGVEHMVGKHAAESIKIITREGTERICRMAFEYSRDQGRRHVTVVHKANIMKYTDGLFREVFYEVARDYEDDFEEIDERIVDNMAMQLVMKPNLYDVLVCPNLYGDILSDLCAGLTGGLGVAPGANIGEDIALFEPVHGSAPKYAGQNRANPLATLLSAKNMLYYLGYGEAADRMQGAINAALKNPETRTKDLGGSAGTREFTRAVISNLTG

SEQ ID NO: 29326 - protein, 362 aa, Pichia angusta
MSKNIVLLPGDHVGPEVVAEAVKVLEAVSSAIGVKFNFSKHLIGGASIDAYGVPLSDEALEAAKKADAVLLGAVGGPKWGTGSVRPEQGLLKIRKELNLYANLRPCSFASDALLKLSPLKSEIVKGTDFVVVRELVGGIYFGDRKEDAGDGVASDTESYSVPEVQRITRMAAFLALQSDPPLPLWSLDKANVLASSRLWRKTVEETIKNEFPQLTVQHQLIDSAAMILVKSPTKLNGVIVTNNMFGDIISDEASVIPGSLGLLPSASLASLPDTNKAFGLYEPCHGSAPDLGPGKVNPLATILSAAMMLKLSLDLVDAGRAIEQAVKNVLDAGIMTADLGGSSSTQEVGDAVAQEVAKLLKN

SEQ ID NO: 29327 - protein, 672 aa, Zea mays
MIPAVADPTTTLDGGARTPLLPETDPRGRAAPAGARQNRPAAAAAATATMTVLTAAVSAVLLLVLVAVTVLASQEGVDGQGGGGVVAVEVAASRGVAEGVSEKSTAPLLGAGAGAALRDFSWTNSMLAWQRTAFHFQPPKNWMNDPNGPLYHKGWYHLFYQWNPDSAVWGNITWGHAVSRDLLHWLHLPLAMVPDHAYDSNGVWSGSATRLPDGRIVMLYTGSTAESAQVQNLAEPADPSDPLLLEWVKSDANPVLVPPPGIGLTDFRDPTTAWRAAPNDGAAASWRVAIGSKDRDHAGLALVYRTEDFVRYDPAPALMHAVPGTGMWECVDFYPVAAAAAGGADGLETSAAPGPGVKHVVKASLDDDKHDYYAIGTYDPATDAWTPDDVEKDVGVGLRYDYGKFYASKTFYDPVLRRRVLWGWVGETDSERADVLKGWASVQSIPRTVLLDTKTGSNLLQWPVVEVENLRMSGKSYDGVALDRGSVVPLDVGKATQLDIEAVFEVDAEGVGVAEEADVTFNCSTSAGAASRGLLGPFGLLVLADEDLSERTAVYFYLVKATDGSLKTFFCQDELRSSKANDLVKRVYGSLVPVLDGENLSVRILVDHSIVESFAQGGRTCITSRVYPTRAINDSARVFLFNNATGVHVKAKSVKIWQLNSAYIRPYPASSL

SEQ ID NO: 29328 - protein, 369 aa, Candida albicans SC5314
MFRQVTKSAPVIRTTQRLFARSYIAGQFTGSKGSDGKYTVTLIEGDGIGPEISQAVKDIYAAADVPIHWEPVDVTPLLIDGKTTLPQPAVDSVNKNLVALKGPLATPVGKGHTSMNLTLRRTFNLFANVRPCKSIVGYETPYENVDTVLIRENTEGEYSGIEHTIVPGVVQSIKLITKPASEKVIRYAFEYAKSINKPHVLVVHKASIMKLSDGLFVNTAKEVAQEYPDVSLDFELLDNTSLRLTADPSQYKNVVMVMPNLYGDIMSDLSSGLIGGLGLTPSGNMGNKVSIFEAVHGSAPDIAGKGLANPTALLLSSCMMLRHMSLNSDADRIENAVLKTIASGPENRTGDLKGTATTTRFTEEVIKNL

SEQ ID NO: 29329 - protein, 170 aa, Zea mays
  misc_feature (7)..(7): Xaa can be any naturally occurring amino acid
RGMAYVXGLVFIHRDLKSDNLLISGDKSIKIADFGVARIEVKTEGMTPETGTYRWMAPEMIQHRPYNQKVDVYSFAIVLWELVTGNVPFANMTAVQAAFAVVNKGVRPAIPHDCLPALGEIMTRCWDANPEVRPPFTEIVRMLEQVEMEVLTTVRKARFRCCIAQPMTLD

SEQ ID NO: 29330 - protein, 399 aa, Saccharomyces cerevisiae
MFKKYKNQDLDMAFWWKKNPKTPSDYARLIIEQLNKFSSPSLTQDNKRKVQEECTKYLIGTKHFIVGDTDPHPTPEAIDELYTAMHRADVFYELLLHFVDLEFEARRECMLIFSICLGYSKDNKFVTVDYLVSQPKTISLMLRTAEVALQQKGCQDIFLTVGNMIIECIKYEQLCRIILKDPQLWKFFEFAKLGNFEISTESLQILSAAFTAHPKLVSKEFFSNEINIIRFIKCINKLMAHGSYVTKRQSTKLLASLIVIRSNNALMNIYINSPENLKLIMTLMTDKSKNLQLEAFNVFKVMVANPRKSKPVFDILVKNRDKLLTYFKTFGLDSQDSTFLDEREFIVQEIDSLPRIISSTTEVSNNNASSSNVASITSPSSVMNNQSSILTHSTSPDSR

SEQ ID NO: 29331 - protein, 505 aa, Burkholderia pseudomallei K96243
MKHDSNVTSPLGHLIDGKRVDGGERVQPVFDPATGASTKRVRMADRPSVEAAIAAAQAAYPAWRNTPPLKRARVMSRFKTLLEEHANELCALITAEHGKVLADAMGELQRGIENVEYASYAPELLKGEHSKNVGPAIDSWSEFQALGVVAGITPFNFPIMVPLWMWPMAVACGNTFVLKPSERTPSSTLRMAELALEAGLPPGVLNVVNGDKEAVDTILTDSRVKAVSFVGSTPIAESIYTTGCAHGKRVQALGGAKNFAIVMPDADIGNAVNALMGAAYGSCGERCMAIPLVVAIGDDTAEQVVDGLKAEIAKMKVGPGTGEQVDMGPLVTRQHFEKVTGFVEAGIAAGATLVVDGRGVKVDGHEGGYYLGPCLFDHVKPGMPIYQHEIFGPVLGVVRVASLAEAMALVDAHEYGNGTCLFTRDGEAARFFSDNIQVGMVGINVPLPVPVAYHSFGGWKRSLFGDLHAYGPDAVRFYTKRKTITQRWPSAGVREGTVFSFPSSR

SEQ ID NO: 29332 - protein, 323 aa, Xylella fastidiosa Dixon
MTFQKHVPHTQPAKLATTPSTQGTATTPSLMSEDDDHRTITESQEKRRSWLERLSAAFSGDPHTLDDLLVILRSAEHHGIIATDTLRMMEGAIAIADLTVGDVMVPRSQMVSLPVESDLQTITKQMVESGHSRFPVHGENKDEVLGILLAKDLLRGVSANHTITNVHELLRPVGMIPESKKLNVLLKEFRLSHNHMAIVVDEYGGVAGLVTIEDVLEQIVGDIDDEHDETEDQTKMIAIQADGCYIVDALTPIEDFNERFNAEFPDDDYDTIGGLVTEAIGHLPETGDELTIGRFAFRVAKANARRIHILHVTVLPPNEQNTA

SEQ ID NO: 29333 - protein, 922 aa, Anabaena variabilis ATCC 29413
MRSSAKTIIGYIHKVCFQDWRSIFMTAPVVAICVMTGGMAGLFQLLEWNMMEQYYALRPVESIDKRILIVTIDEQDITQIGKWPIPDLILAKLIVKLKAQKPATIGLDIYRDLPVEPGHQELVGVIKSTPNLIGIKKLVGDQVAPSPTLSELGQIALADLVADTDGKVRRGLLSAGDSEEKIFLGLAPRLSLMYLQSKGIALEELNPTGTSLRLGKAVFTPLTGEEFSYRGTDVGGYQIMLNYRGFQGNFDTVKMRDILNDSISSELIRDRIILIGTTAKSINDFVNVGYSHNVQDDEKRMAGVVVHANLVSQILSAALDGRPLLRVCSEQAEWLLIFFWSFINSVVTWYGLQVNSQRKQSLPGWPILVILLSTSIIFGSSYTAFMIGWWIPVMSPLLTTFLSIIVTTNLYKQLQLEKANQQLQDYSRTLEEKVRDRTQELETAKIAADVANQAKSEFLASMSHELRTPLNGILGYAQILERSENIAPTVLEGINIIHQCGSHLLTLINDILDLSKIEAGKLELHNTDFDFSYFLTGVVEMCRIRALQKGISFHYLPDPHLPQAINADEKRLRQIIINLLGNAIKFTETGGVNFTIQVLEVGANFHKIRFQVEDTGVGMTPEQLTKIFLPFEQVGDKSKQVEGTGLGLAISCKMAELMGGQIQVDSILGTGSKFWLDLNLNIISHWLQTSSIFHKKKIIGIQGKQPRILVVDDKWENRSIICNFLRSIGFECLEATNGQEGLNIAVTNQPDLIITDLAMPVIDGFEMIQTLRSLPQTSNVTILVSSASVFESDRKKSLQIGGNEFLPKPLEIDKLLQYLQDYLQLDWIYIEDSKQTKVSENQPSQFNKHQLIVTPPISALDKLLDLSMRGNIKGIQIILNEIEELDATGNLTGFVTQVRQLCDSFQIKQIRELIKYLKTGTS

SEQ ID NO: 29334 - protein, 713 aa, Sulfitobacter sp. EE-36
MKPADQLAHEQRRRAEVEALLEQTQAELCAAYRKLDDHAQNVSVEISETRAEVENIRGENKRVMSDLCAAREQIELTQRRLWHSVETIHDGFAFFNKDNEMIMANRSYLAVFDGIDAIRPGVSYSTILRVLTDEGIVNIGRRTPEEWRAKMLLRSQQKAPAPIIIKLWNGAYIKIVDQRGKGGDIVSLARDITETVEYQRKLVDARATAEAANSAKSLFLAKMSHEIRTPMNGIVGMTEVLGDTALTQDQRLYVDTIKTSGEALLVIINDVLDFSRIEANRLSIHPAPFDLERVFQEVLLLLQPLAVQKGLDLALDYDLFLPRKLVGDAGRIRQVLTNLVGNAVKFTQNGHILIRATGLPDAGSGNVLIKILIEDTGIGIAPDMIEHIMGEFTQASSDPSPNAEGTGLGLAICQRLVQLMGGEIWVTSEHGIGSCFGFELPLKAQEDSAAPPLKPPPFLRHVLIVERETICRSILQRNLEHIGVRVTSCGTGSEGLAALDGSIDLLLVDDTLPDMDGIEFARAVHVSDPATQVILYSQTPDKIRDSMDDTSVRRIMKNPISVTELLAEVSTMQPVPVGTRPMRVLAAEDNKTNRLVLRKMLQRLNIDLQLATNGQEAVALFETFRPDLVFMDISMPKMNGKDAAAAIRALEDGASSCPIVALTAHAIQDEKERILAAGLDHFLTKPLRKAELVALLNRYCPNAAFPLEGQLVG

SEQ ID NO: 29335 - protein, 119 aa, Arabidopsis thaliana
  misc_feature (97)..(97): Xaa can be any naturally occurring amino acid
MEGLLKLSTLVIVCMLVTAPMASEAAISCGAVTGSLGQCYNYLTRGGFIPRGCCSGVQRLNSLARTTRDRQQACRCIQGAARALGSRLNAGRAARLXPGACRVRISYPISARTNCNTVR

SEQ ID NO: 29336 - protein, 751 aa, Nitrosomonas europaea ATCC 19718
MAKAKVSGSAKKNIVTSTEVTETKSGKSRVETPDNGVKVTGKNAKNTFSAETEVVSVKKEATSASRKKSVKAAKSDDDSVLVGQNKNTLLPAEKSEDLGAVDEVSEKTRVSKRNKSTLSEKQITDLSESAVSVSSDNDIELRRMRLKKLIMQGKERGYLTYSEINDHLPDDMLDADQIESIISMINDMGISVHDEAPDAEALLMSDAATAVTDEDVVEEAEAALSSVDSEFGRTTDPVRMYMREMGSVELLTRESEIEIAKRIEDGLRHMIQAISACPTIIENILELAADVENGRLRADELVDGFLDDDTDEIMGKEMSEESLDQDFDSEDGEDEQVAAASADMLKMKAEVLERFAVIRQTYDGMKKIINKKDGRQDKKYKQLQEKISTELMAMRFSAKMVEKLCDTQRDIVNDIRNCERKIAELCVTRAGMPRNYFIKAFPGNETDIDWISSEVESGQPYSQSLEHFRPAVMEQQQKMLELQKQAGIPIKELKEINRRMTTGEAKARRAKREMTEANLRLVISIAKKYTNRGLQFLDLIQEGNIGLMKAVDKFEYRRGYKFSTYATWWIRQAITRSIADQARTIRIPVHMIETINKMNRISRQILQETGQEPEPAVLAEKMEMPEEKIRKILKISKEPISMETPIGDDEDSHLGDFIEDASTMEPADAAVYAGLRTVTKDVLDSLTPREAKVLRMRFGIEMNTDHTLEEVGRQFDVTRERIRQIEAKALRKLRHPARSDRLRSFLDSGNS

SEQ ID NO: 29337 - protein, 331 aa, Vibrio fischeri ES114
MTIKVGINGFGRIGRFVFRASVERNDIEVVGINDLIDVEYMAYMLKYDSTHGRFNGTVEVVDGNLVVNGKTVRVTAERNPEDRKWDAINVDVVAEATGLFLDDATARKHITAGAKKVVLTGPSKDATPMFVMGVNHESYAGQDIVSNASCTTNCLAPVAKVLNDKFGIESGLMTTVHATTATQKTVDGPSAKDWRGGRGASQNIIPSSTGAAKAVGVVLPELNGLLTGMAFRVPTANVSVVDLTVNLKTAASYEAICAAMKEASEGELKGVLGYTEDAVVSQDFIGEVQTSVFDAAAGVALTDKFVKVVSWYDNEIGYSNKVLDLIAHVSK

SEQ ID NO: 29338 - protein, 321 aa, Glycine max
AGPPSSQLRRPPPDIIQHDTGDVYNGHYYHSHYDTESNQIQNDEIIARALQEEFSRLDIAECSGYSQTDEEQFHASEPTCDWNNTSMMNYCSGHDYAYNGVGDIEPSSSSCCSPCEVEESSLELTDNYPLDGEIGRRLSQMVPIPHVPKINGEIPSIDEATSDHQRLLDRLQLYDFVEHMVQGDGNCQFRALSDQLYNTPDHHKYVRRQVVNKLKSHPEIYEGYVPMEYAEYLEKMSKSGEWGDHVTLQAAADSYGVRIFVMTSFKDTCCIEILPHFEKPKGVIFLSFWAEVHYNSIYPQGDIPSSESRKKKRWWNFGTKH

SEQ ID NO: 29339 - protein, 519 aa, Novosphingobium aromaticivorans DSM 12444
MNAINPTGWRPSMGENVPAGGVQTFTGNRALQLEEALIFELGQADRSGVDFPETDGIDLSALGPLARAERPDLPGLSEPEAVRHYTRLSRQNYAIDLGLFPLGSCTMKHNPRLDEKVARMPGFADVHPLQPVQTVQGALGVINELAHWLIELTGMHGVAMTPKAGAHGELCGLLCIRAALEAKGDPRNVILVPESAHGTNPATAAFAGFKVENIPATPDGRVDTAALTARLGPDIAGVMITNPNTCGLFERDLKVIADAVHAAGGYVYCDGANFNAIVGRVRPGDLGVDAMHINLHKTFSTPHGGGGPGSGPVVLSEALSPFGPLPFTARQADGSIRLIEEEHAHEEHPQAFGRMCAFHGQMGMFTRALAYILSHGADGLRQVSGDAVLNANYVLRSLDDVLDAPFGAAGPCMHEALFSDDGFAEGFSTLDLAKGLIDEGYHPMTVYFPLVVHGAMLVEPTETESKAGLDQFIGAMRSLAERARAGDEALKSAPHLAPRRRLDETLAARKPRLVWSSQA

SEQ ID NO: 29340 - protein, 600 aa, Arabidopsis thaliana
  misc_feature (258)..(258): Xaa can be any naturally occurring amino acid
  misc_feature (262)..(262): Xaa can be any naturally occurring amino acid
  misc_feature (284)..(284): Xaa can be any naturally occurring amino acid
MNSLVRRKQVDSVHLIKNDGPHQLAKKLSAVDLVAIGVGTTIGAGVYILVGTVAREHTGPALAVSFFIAGVAAALSACCYAELASRCPSAGSAYHYAYICLGEGIAWLVGWALVLDYTIGGSAIARGITPNLASFFGGLDNLPVFLARQTIPGVGIVVDPCAALLIMIVTILLCFGIKESSTVQAIVTSVNVCTLVFIIVVGGYLACKTGWVGYDLPSGYFPFGLNGILAGSAVVFFSYIVVDTPTSTCARKKTDQRXLRLXINAATEGSSSSSFVVADVAFGXVPYYSQNTGTPISFAFGDRGMQWARHILTTGAITALCASLLGSLLAQPRIFMAMARDGLLPAFFSEISPRTQVPVKSTIAIGVLAAALAFFMDVAQLSEMVSVGTLMAFTAVAVCVLVLRYVPPDGVPLSSSSQTLSDTDESRAETENFLVDAIESSDSPLLGNETARDEKYFGKRRKIAAWSIALVCIGVLGLASAASAERLPSFPRFTICGVSAVILLGSLITLGYIDEDEERHNFGHKGGFLCPFVPYLPVLCILINTYLIINIGAGTWIRVLIWLLIGSMIYIFYGRSHSLLNNAVYVPTMTCTRKTTDHLA

SEQ ID NO: 29341 - protein, 618 aa, Zea mays
MSSFFAVAVALVLSSLIHGTTMATASSEESFFQKCPASSCSEGGPEIRFPFRLATSPLSCGAPGMELVCSKADTVLVHPNLGLCKVTAIWYGGSTITIVPLAAEPEPKCPFQKIISTNLSTDVYRPYGDRATLVSCSAEFIVPSHPASLAGPISCLTNASRRFTYLVPSFRPMDFLPLDCTVLSNSISVPYPASVNAGFNGTARGAVAFGETMLEWRVPNITDVCRDCEAEGRLCGFSSESRQAFCKSKNHSSRLKVIAVTTPVAAVLVLSAMAGAALLHLALKSKYDDEIHRKVEMFLETYRTLKPRRYTFSEVRKMTRRFSSRLGQGGFGSVYKGELPNGGVPVPVAVKMLEDSTGEEEFISEVATIGTIHHANVVRLLGFCSERSRRALVYEFMPNASLEKYIRCSSQEQSLIPTASKMLEIATGIARGIEYLHQGCDQRILHFDIKPSNILLDYNLNPKISDFGLAKLCARDQSVVALTAARGTMGYIAPELYSRNFGTVSCKSDVYSFGMVVLEMVVVSAKRRKYSPAETEDQNDDVCVPEWIYEEIVTGQEPREMARGERDMVRKLAIVALWCIQWNPPNRPSMTTVVNMLTDSLQSLKIPPKPFVSSFVGQ

SEQ ID NO: 29342 - protein, 494 aa, Bacillus thuringiensis serovar konkukian str. 97-27
MLTKNIELKPKVKAFLNEEIKMFINGEFVPSISGKTFETYNPATEDVLAVVYEAQEEDIDVAVKAARSAFESGPWVEMTTAERAHLIYKLADLIEEHGEELAQLEALDNGKPYQVALDDDIAATVENYRYYAGWATKIIGQTIPISKDYLNYTRHEPVGVVGQIIPWNFPLVMSSWKMGAALATGCTIVLKPAEQTPLSLLYTAKLFKEAGFPNGVVNFVPGFGPEAGSAIVNHHDIDKVAFTGSTVTGKYIMRQSAETIKHVTLELGGKSPNIILEDADLKEAINGAFQGIMYNHGQNCSAGSRVFVHRKHYETVVNELVKMANNVKLGAGMEKETEMGPLVSKKQQERVLHYIEQGKAEGATVAAGGERAFEKGYFVQPTVFTDVTDDMTIVKEEIFGPVVVVLPFDSTEEVIERANRSSYGLAAGVWTQNIKTGHQVANKLKAGTVWINDYNLENAAAPFGGFKQSGIGRELGSYALDNYTEVKSVWVNIK

SEQ ID NO: 29343 - protein, 479 aa, Exiguobacterium sibiricum 255-15
MTTATTYTYLLDGQWQESESNETIEISSPYKEDTVGRVQAMTKTEVDRAIASAKAAQAEWAKVPANKRAELLHAWATELEKRANEIGEVIMREVGKGLADGIKEVKRTAEIIRYTAEEGLRFDGQMMQGDSFPGGSAKKIAIIKKAPLGVVLAISPFNYPVNLAAAKLAPALMTGNAVVFKPATQGSISGTLMVEALVAAGLPSGLVNLVTGRGSVIGDYLTAHPGINMITFTGGTATGQHLSRQSAMIPLVLELGGKDPALVLEDADLSLAADHIISGAFSYSGQRCTAIKRVFVLEPQADALVEELSARIAKLTVGSPEDESVVVPLIDTKSADFVEGLITDAKEKGATLVTGGNRTANLIEPTLFDHVTRDMRIAWEEPFGPVLPVIRVNSVEEMIAYANESEYGLQASVFTENIDAAFSVADALETGSVQINGRTERGPDHFPFIGVKSSGLGVQGVGRSLASMTRDKLTVLNLK

SEQ ID NO: 29344 - protein, 703 aa, Haloarcula marismortui ATCC 43049
MADSSRIGCLYVDACTDEQATAYDWCQEAVDGAERCALSSVEPTEYDVLWWHRDELFDERALADAPALAAYVRDGGTLLLTLSALPAVEPLGFEEVAPDATGWEEVPEPTGHLWQALYDDHPIHADYDTLRVHTRGAGVTIPYARYESIAPRSGDVLASTIRGDTDVVKQMAILSWEPGDGQVLGIGSSVAFAQPTHDVCQGNRETLIENALAFLAADERHPLTGRPKNVDTFGQLRERLDDDPSRPSYHVTPPANWLNDPNGLIHWNGRYHLFYQYNPAGPFHNTIHWGHAVSDDLVHWEDRPVALTPSPDGPDRDGCWSGCAVDNAGVPTVLYTGGRDKRQLPCIATAADDDLTAWDKDPDNPIIEELPAEPEVLRTEDWEGEFRDHCVWRENETWHQLIGAGIEGGGGAALLYESADLRNWEYQGPILAGDRDTAGTVWECPELLDFGDRQLLHISNYEDVVYFLGTYEDGEFDVDRRDKLDHGDFYAPQSMWTDDGRILTWGWLPEARDVSGQWDAGWSGAMSLPRELSLADDGGLCQRPAPELTELRGDNTSYDVVRLDAGDTEQLPVESRSFELRATVRLEDAEAVELSVLESPDGEERTPIRYSYESEIAVDRSASSTDPQATGDTQTMRVRPYDAPLSLRVFVDGSVVEVFANERHCLTSRVYPTREDATGISLSAEDGHATIASLDVWELDSVW

SEQ ID NO: 29345 - protein, 119 aa, Arabidopsis thaliana
KNLVPLGPCIGKSPPPGGFHLPIMSLNILPANANPKVWLKPPSEMSFLYGTHVFKGGLGRIPHSIVPANGVVVFSMSDVPLGFGIPPKSTQDCRKLDPKGIVVLHQPDIGKYFRGENAL

SEQ ID NO: 29346 - protein, 530 aa, Aspergillus niger
MAEGFVDASRVEAPVTLKTYLMCAFAAFGGIFFGYDSGYISGVMGMRYFIEEFEGLDYNTTPTDSFVLPSWKKSLITSILSAGTFFGALIAGDLADWFGRRTTIVSGCVVFIVGVILQTASTSLGLLVAGRLVAGFGVGFVSAIIILYMSEIAPRKVRGAIVSGYQFCITIGLMLASCVDYGTENRLDSGSYRIPIGLQLAWALILGGGLLCLPESPRYFVKKGDLAKAAEVLARVRGQPQDSDYIKDELAEIVANHEYEMQVIPEGGYFVSWMNCFRGSIFSPNSNLRRTVLGTSLQMMQQWTGVNFVFYFGTTFFQSLGTIDDPFLISMITTIVNVCSTPVSFYTIEKFGRRSLLLWGALGMVICQFIVAIVGTVDGSNKHAVSAEISFICIYIFFFASTWGPGAWVVIGEIFPLPIRSRGVALSTASNWLWNCIIAVITPYMVDKDKGDLKAKVFFIWGSLCACAFVYTYFLIPETKGLTLEQVDKMMEETTPRTSAKWTPHGTFTAEMGLTANAVAEKATAVHQEV

SEQ ID NO: 29347 - protein, 120 aa, Gossypium hirsutum
MASSMSLKLACVVVLGMVVGAPLAQGAVTCGQVTNSLAPCINYLRGSGAGAVPPGCCSGIKSLNSAAQTTPDRQAACRCIKSAAAGITGINFGLASGLPGKCGVNIPYKISPNTDCNRFV

SEQ ID NO: 29348 - protein, 545 aa, Robiginitalea biformata HTCC2501
MPFPKINPSTTQAWNQLRAHYERTHNRHIKDLFASDPERASRMSLRWNGFFVDYSKNRVDDETLELLLSLAEACDLETAMDAYFDGEAINQTEGRAVLHTALRNGSDSGLEIDGEPVEKEVGRVREHMRAFCEAVISGDKKGYTGKPFTDVVNVGIGGSDLGPVMVTEALQFYSNHLRTHFVSNVDGDHVHETLRKLNPETTLFVIVSKSFTTQETLSNALTIKKWFLEHATQADIAKHFAAVSTNTAKIEEFGIADANVFPMWDWVGGRFSLWSAVGLSIALSIGFDQFEALLSGARSMDRHFREAPWKENIPVILGLLSIWYNNFHGAETEAVIPYSQYLHRLPAYLQQGIMESNGKSVDRNGVPVAYQTGTIIWGEPGTNSQHAFFQLIHQGTKLIPADFIGFRHSLHGDREHHLKLMANFFAQTEALMNGKTPEAVRDELSGQGLGDDALENLLPFKVFEGNKPTNTILIERLSPESLGALVALYEHKIFVQGVIWNIFSYDQWGVELGKQLASTILSELTSGQVGNHDTSTLQLLQYFKS

SEQ ID NO: 29349 - protein, 487 aa, Glycine max
TQQILLFLTKLLSKNSSGDSISTMSNSEHNIITGHAGYVLEDVPHLSDYIPHLTTYPNPLQDNPSYSVVKEHSVDVDDTIAQKAIVHKNSPRETHFRRAGPRQKVYFESEDVYACIVTCGGLCPGVNTVIREIVCGLYHMYGVHKVLGIEGGYRGFYSCNTIPLTPKVVNDIHKRGGTILGTSQGEGGNDTLKIVDSIQDRGINQVYILGGDGTQRGASVIFEEIRRRGLKVSVVGIPESVDNDIPVIDKSFGFDTAVEEAQRAINAAHVEAESTENGIGVVKLMGRHSGFISMYATLASRDVDCCLIPESPFYLEGPGGLFEFIRKRLAENGHMVIVISEGAGHELISESLSATNKQEASGNKLLQDVGLWLSQKIKDHFTKSQKMDITLKYIDPTYMIRAVPSIASDNVHCTLLAQSAVHGAMAGYTGFAVGTVNGKHAYIPFYRINEIEKKVVITDRMWARLLSSTNQPSFLNPKDITTHQTGN

SEQ ID NO: 29350 - protein, 116 aa, Gossypium hirsutum
MSLKLACVVVLCMVVGAPLAQGAVTCGQVTNSLAPCINYLRGSGAGAVPPGCCSGIKSLNSAAQTTPDRQAACRCIKSAAAGITGINFGLASGLPGKCGVNIPYKISPSTDCNRFV

SEQ ID NO: 29351 - protein, 438 aa, Zea mays
MATPSSMTSTEKEKAIDDWLPITSSRNAKWWYSAFHNVTAMVGAGVLSLPYAMSELGWGPGVVAMVLSWVITLYTLWQMVEMHECVPGKRFDRYHELGQHAFGDKLGLWIVVPQQLIVEIGVCIVYMVTGGKSFEKCYTVACPDCKPLRTSSWIMVFAAIHLLLSQLPNFNSITLVSLAAAVMSLTYSTIAWAASAHKGRHSAVDYSMKASTTTGQTFNFLSALGDVAFAYAGHNVVLEIQATIPSTPDKPSKKPMWQGVVLAYLVVAICYLPVAFVGYYVFGNAVDDNILITLEKPRWLIAAANIFVVVHVIGSYQIYAMPVFDMLETFLVKKLRFKPGMPLRLIARSLYVVLTALVGIAVPFFGGLLGFFGGFAFAPTTYYLPCILWLKIKKPKKFSLSWFINWFCIIVGVLLTVLAPIGGLRSIVVNASTYKFFS

SEQ ID NO: 29352 - protein, 464 aa, Pisum sativum
MLSKLTILFITLTFTLSLALDMCIISYDKTHPDKSTPRTNDQVLTMYEEWLVKHGKNYNALGEKEKRFEIFKDNLGFIDEHNSKNLSFRLGLNRFADLTNEEYRTRFLGTRINPNRRNRKVNSQTNRYATRVGDKLPESVDWRKEGAVVGVKDQGSCGSCWAFSAIAAVEGVNKLATGDLISLSEQELVDCDTSYNEGCNGGLMDYAFEFIINMVALTPEEDYPYRAIDGRCDQNRKNAKVVSIDQYEDVPAYDEGALKKAVANQVIAVAVEGGGREFQLYDSGVFTGRCGTALDHGVAAVGYGTENGKDYWIVRNSWGGSWGEAGYIRLERNLATSKSGKCGIAIEPSYPIKNGLNPPKPAPSPPSPVKPPSVCDSYSCAEGSTCCCIFDYGGSCFEWGCCPLESATCCDDHYSCCPHEYPVCDTYAGLCRKNKNNPLGVKSFKRTPAKPHFAIEGKNKMGSV

SEQ ID NO: 29353 - protein, 489 aa, Arabidopsis thaliana
MEGENSSIEKGLLLIRKEESANTTPFLVFTTFIIVSASFSFGVALGHTAGTMASIMEDLDLSITQFSVFGSLLTFGGMIGALFSATIADSFGCKMTLWITEVFCISGWLAIALAKNIIWLDLGRFFVGIGVGLLSYVVPVYIAEITPKTVRGTFTFSNQLLQNCGVATAYYLGNFMSWRIIALIGILPCLIQLVGLFFVPESPRWLAKEGRDEECEVVLQKLRGDEADIVKETQEILISVEASANISMRSLFKKKYTHQLTIGIGLMLLQQLSGSAGLGYYTGSVFDLAGFPSRIGMTVLSIVVVPKAILGLILVERWGRRPLLMASAFGLCLGCISLALAFGLKGVPGVNVNVTPTLAFIGIMVSKNQFSNLYYLQNKKSYFFVLCKCYFLVITFVMMFAAGLGALPWIIMSEIFPMDMKVVAGSLVSITNWFTGWIVSYCFNFMLLWSPTGTFIIFATISGATVVFAWCLVPETRGLTLEEIQRRAN

SEQ ID NO: 29354 - protein, 432 aa, Rubrobacter xylanophilus DSM 9941
MADVTFDYRNLLEVEGGLTGRELEEISPRLRAAVGTLLEDPPGFMRLPRTREHLEASLEVAERVRSDGATDFVHVGIGGSALGPMVLHRALSHPFYNLLPDRGGPRLHFAENADPATLSGILDVIEPEGTWVNVVTKSGSTAETMANFLVIRGALAEALGDFGYQARTVVTTDPEKGFLKRIADREDLVTLQVPPEVGGRFSVLSPVGLLPAAVAGLDVEALLAGAARCVEELEEQGAEHPAVVGAAMHHLMDASRGRNIRVMMVYADALERLAAWFVQLWAESLGKDGKGSTPHGAVGTTDQHSQLQLYMEGPQDKVIEIVEVREHPRDVGIPGAYEDLEGVGYLSGHTVGELLNVECDATRRALTGAGRPNATIRLGSLSAENLGYLMQALEVQTAVAGALYGVNPYDQPGVEAGKRITYARMGRPGYRA

SEQ ID NO: 29355 - protein, 905 aa, Arabidopsis thaliana
MRLRHQGGQYLARGMEPVYWSNKVDSTHDLYDNYTLGSYQNNSYNILAHTGFGYDHEFQIYEINSNSWRIIDATLDFKLGYIGRGVSLKGKTYWIASGEEEKRLGKFLISFDYTTERFERLCLPNKYPCYATLALSVVREEKLSMLSQRGIKSKAEIWVTNKIGETQVVSWSMVLALDLQPKRCIGESGSFLVDEKKRVVVCCDNIRDQGKTTFDSNLPRYHRQKKKGRMIIVFDVESMRLPVTVKATKPSFLVIWIRYSSAASSPTVSLNPSGRLQQTLAGSVEVKGKSLHSGKFSTVKLNPEIAGAGRFFEFRSRFIPASIEFAQESPLCTTLLKDELKIRTVEHLLSALEAKGVDNCRIQIESESSDDREVEVPIFDGSAKEWVDAIQGVGINAAQNHDGESVEKMVAHVNKPVDSDHLWYRLPTGCQWFSWRPIHESSFAKDIASSRTFCVYEEVERMREAGLIKGGSLDNAIVCSAEHGWMNPPLRMRRRRCDLQPKRTRMCDLQPKRTSMCDLPPKLVGEKILTRIPITSLRAVRSTCKLWNALTKDRVLVRFHLRRSKEEEEDTMDLSIKQVDLLNQVEISRVYHCDGLLLCVAKDNSRVVVWNPYLGQTRWIRPRTESNIGDSYALGYDINRNHKILRMVQTRNVSVYRYEIYDLRSNSWRVLEVTPNGEMDPNHPLYGVSVKGNTYFFAHEDSSSGEIDEDGDIIDLEDFLLCFDFTTETFGLRLPLPFHSTIDATVTLSCVRDQQLAVLYHNEGLHSDDRFTTVEFWVTTSIEPNSVSWSKFLTVDMRPLALTGVRFDNDMGATFFIDEDEKVAVVFDLDGYLSTESARYHTAFISGKDGFFKPVTLGVAPNVGEPCPRTGHIPTTYRPPLVCSSTYLPSLVQVNQQRKRKERHV

SEQ ID NO: 29356 - protein, 382 aa, Daucus carota
MRFTRVYTEVFNMTDHSLLCTETNNLCFDDLEARDDQDPRIDCENVVGNESEALICAVPLQRDEDFVFVFESKVNFCPEVIFSTDRSGELDLCVRKEALDWIYKAHAHYNFGALSVCLAVNYLDRFLSLYELPSGKKWTVQLLAVACLSLAAKMEEVNVPLTVDLQVADPKFVFEAKTIKRMELLVLSTLKWRMQACTPCSFIDYFLRKINNADALPSGSLIDRSIQFILKTMKGIDFLEFRPSEISAAVAICVTREAQTLDINKAMSNIIPVEKDRVFKCIEMIQDLTLVTETSNVASGRTRAQVPQSPVGVLDAACLSYKSDERTVGSCPNSSLHTETSPHTKRRKLIEIMKCGFYSITQFQIFSEWEFWCGCLCKRPPL

SEQ ID NO: 29357 - protein, 527 aa, Caulobacter crescentus CB15
MLDAGLKAQLTTYLQNLRQPITLVASLDDSKGSVDMRALLDDVASTSDKVSVRFDGDDARKPSFAIERAANDAEVRFAGLPLGHEFTSLVLALLHVGGHPPRIDAEVIERIKALDGDYQFETYFSQSCQNCPDVVQALNTMSALNPRIRHVAIDGALFKAEVEARQVMAVPTILLNGQAFGQGRMEIEQILAKLDTGAADRMAEKIRAKDAFEVLVVGGGPAGAAAAIYAARKGIRTGVAAERFGGQVLDTMDIENFISVPHTEGPKLASALEQHVKDYEVDVMNLQKAVGLVPAKTPGGLHEIKLENGANLKARTLILSTGARWRNVNVPGEAEYKNKGVAYCPHCDGPLFKGKRVAVIGGGNSGVEAAIDLAGIVAHVTLIEFDSQLRADAVLQRKLASLPNVTIIKSAMTTEIHGDGSKVNGLTYKDRTSDTAHRVDLEGVFVQIGLVPNTEWLKDSGVALSPRGEIEVDYRGETSIPGVFAAGDATVTPYKQIIIAMGEGAKASLSAFDYLIRLPASEAAEAA

SEQ ID NO: 29358 - protein, 396 aa, Pseudomonas amyloderamosa
MANTKVADVVTETLHVAGVKRIYGVVGDSLNGITDSLRRRGDIDWIHVRHEESAAFAAGAEAHLTGELAVCAGSCGPGNLHLINGLFDCHRSRVPVLAIAAHIPSAEIGRGYFQETHPESLFRECSHYCELVSSPEQLPGVLESAIRAAVGLRGVAVVIIPGDVALRESNAKPAAGASMALRPPVVQPAAADVDALAQLLNDSGKVTLLCGRGCAGAHDPLVKLAEALKAPIVHAFGGKEYVEYDNPYDVGMTGLIGFSSGYHAMLNCDTLLMLGTDFPYRQFYPADAKIAQVDVRPENLGRRARLDLGMVGDVSATIGALLPKLKARTDRAYLDACLAHYRKAREGLDELPPASRDASPFTHNTWPSWSARQRRTMRFSRSTWARRRSGPRVISP

SEQ ID NO: 29359 - protein, 421 aa, Brucella suis 1330
MTTENLLESALVRLDEAASHINIDADVIEKLKFARETMKVRLMIRMDDGSRKSFIAWRCRYDDTRGPTKGGIRYHPDSTVEEVETLAFWMTFKCAVMNLPYGGGKGAIQVDPRQLSKAELERLSRAYIQAFSGIIGPDRDIPAPDVYTNSMIMGWMADEYSQIVGQSSPAVITGKPIALGGSLGRNDATARGGFYLVRHLSHDLGLASVLRVAIQGFGNAGQFMAKLMAGDGHKIVAVSDSAGAVYCADGLDVDLLLAAKADGKSVISTAGHKGHEAISADELVAADCDVLVPSAMENMIHASNAASIRAKLIVELANGPVTGDADKILAEKGVMVLPDILANAGGVTVSYFEWVQNRQGYYWTLEEIHERLKTIMEREGRAIWNHARERGVTLRTAAYVHALERLAQAIEAHGTQNDFAA

SEQ ID NO: 29360 - protein, 354 aa, Chaetosphaeridium globosum
MQTEVLQETERPVFPFTAIVGQEEMKLALLLNVIDPKIGGVMIMGDRGTGKSTTVRALVDLLPEIEVVEDDAFNSDPRDPELMSEYVRNKVKNNEKISTIRTKINMVDLPLGATEDRVCGTIDIEKALTEGVKAFEPGLLAKANRGILYVDEVNLLDDHLVDVLLDSAASGWNTVEREGISISHPARFILIGSGNPEEGELRPQLLDRFGMHAQVGTVKDAELRVKIVEQRTSFDQNPKVFRDSYQSSQDNLSSQINEARERLPKVKIDYALRVNISRICAELNVDGLRGDIVTNRASKALAALRGRFEVTPKDIMTVIPLCLRHRLRKDPLESIDSGLLVLEKFSQIFGYSTK

SEQ ID NO: 29361 - protein, 119 aa, Candidatus Pelagibacter ubique HTCC1002
MTQTLFEKYGGKKTVGQIVINFYQKLMADENLKKFFTNSDMKVLISHQTNFISQALGGPKEYTGLDMKTAHQGMKISQEDFNGVAGHLKQTLEELNVESQDVDTIIGVVAPLSEHIVSK

SEQ ID NO: 29362 - protein, 291 aa, Arabidopsis thaliana
  misc_feature (128)..(128): Xaa can be any naturally occurring amino acid
  misc_feature (169)..(169): Xaa can be any naturally occurring amino acid
  misc_feature (179)..(179): Xaa can be any naturally occurring amino acid
  misc_feature (189)..(189): Xaa can be any naturally occurring amino acid
  misc_feature (198)..(198): Xaa can be any naturally occurring amino acid
  misc_feature (201)..(201): Xaa can be any naturally occurring amino acid
  misc_feature (280)..(280): Xaa can be any naturally occurring amino acid
MAEASDLLEWPKKDNRRFLHVVYRVGDLDRTIEFYTEVFGMKLLRKRDIPEEKYSNAFLGFGPETSNFVVELTYNYGVSSYDIGTGFGHFAISTQDVSKLVENVRAKGGNVTREPGPVKGGGSVIAFXKDPDGYTFELIQRGPTPEPFCQVMLRVGDLDPPVRKFYEKXALGMRLFEKXIERPLSTKYXPWACWGMLXKEXRVRIVLELTYNYDVTEYTKGNAYAQICLILQMTGTKAGEGMKRSNQELGGKSTKEAGPVSGLGTKNGSFLDPDGWKTAXVDNIILLKELE

SEQ ID NO: 29363 - protein, 583 aa, Aspergillus niger
MGVSNMMSRFKPQADHSESSTEAPTPARSNSAVEKDNVLLDDSPVKYLTWRSFILGIVVSMGGFIFGYSTGQISGFETMDDFLQRFGQEQADGSYAFSNVRSGLIVGLLCIGTMIGALVAAPIADRMGRKLSICLWSVIHIVGIIIQIATDSNWVQVAMGRWVAGLGVGALSSIVPMYQSESAPRQVRGAMVSAFQLFVAFGIFISYIINFGTERIQSTASWRITMGIGFAWPLILAVGSLFLPESPRFAYRQGRIDEAREVMCKLYGVSPNHRVIAQEMKDMKDKLDEEKAAGQAAWHELFTGPRMLYRTLLGIALQSLQQLTGANFIFYYGNSIFTSTGLSNSYVTQIILGAVNFGMTLPGLYVVEHFGRRNSLMVGAAWMFICFMIWASVGHFALDLADPQATPAAGKAMIIFTCFFIVGFATTWGPIVWAICGEMYPARYRALCIGIATAANWTWNFLISFFTPFISSSIDFAYGYVFAGCCFAAIFVVFFFVNETQGRTLEEVDTMYVLHVKPWQSASWVPPEGIVQDMPAPLPLPSRRVRLRWLSTPSPLSSASKPLALARTHFASCSCTLNLHLKL

SEQ ID NO: 29364 - protein, 830 aa, Photobacterium profundum
MKVSRRKFIKAQAVASAAAAAGISIPISASNVVTDSSLTKITWEKAPCRFCGTGCSVNVGTKEGKVVATHGDIKSPVNRGLNCVKGYFLSKIMYGKDRLTQPLLRMTDGKFDKNGEFSPISWDQAFDIMAEKWKKTLKEKGPEAIGMFGSGQWTIYDGYAASKLMKAGFRSNNLEPNARHCMASAVVGFIRTFGIDEPMGCYDDIEAADAFVLWGSNMVEMHPILWTRVTDRRLSVPGVKVSVLSTFEHRSFELADIPIIFTPQSDLAILNFIANYIITNDKVNKDFTSKHVNFRRGTTDIGYGLRPEHPLQQAAKNPDSGDSTPMTFEEFKAFVSEYTVEKASEISGVKPDKLIELAELYANPETKVVSFWTMGFNQHTRGVWCNNLVYNIHLLTGKISTPGNSPFSLTGQPSACGTAREVGTFAHRLPADLVVTNPEHRKIAEKIWKLPDGTIPGKVGAHAVLQSRMLKDGKINAYWIQVNNNLQAGANINEETLPGYRNPDNFIVVSEAYPTVTSQAADLVLPTAMWVEKEGGFGNAERRTQLWHQMVEAPGESKPDLWQLMEFSKRFKTDEVWPKELLDSNPDYKGKTLFDVLFINGNVNKYPLDDLAEGTLNDESNYYGFYVHKGLFEEYAEFGRGHGHDLAPFDMYHETRGLRWPVVDGKETLWRYREGSDPYVKEGAGFEFYGKPDGKAIIFALPYEPAAESPDEEYDMWLSTGRVIEHWHSGSMTQRVPELYKAYPDAQVFMHPDDAKSRGLRRGDAVKVMSRRGEIITRVETRGRNKPPIGLVFVPWFDASQLINKVTLDATDPLSKQTDFKKCAVKIVKA

SEQ ID NO: 29365 - protein, 118 aa, Shewanella oneidensis MR-1
MLKITSKQLEVTAPIRERIESRFEKLSRHDVQLINPHVIITEEKPGFKIEASVGIPNGELFAQAKHDNLYAAITAMGQKLEKQLNRLTHKPEAQRFASIDHSEEAINVEEDYEEEDAA

SEQ ID NO: 29366 - protein, 513 aa, Solanum tuberosum
MALLHLPPVTQRRLQSFFLPYTDNHVSLVPDDSGDVAMNQILKIGVVLSGGQAPGGHNVISGIFDYLQTHCKGSTMYGFRGGPAGVMKGKYVVLTPEFIYPYRNQGGFDMICSGRDKIETPEQFKQAEETAKKLDLDGLVVIGGDDSNTNACLLAENFRSKNLKTRVIGCPKTIDGDLKSKEVPTSFGFDTACKIYAEMIGNVMIDARSTGKYYHFVRLMGRAASHITLECALQTHPNVTLIGEEVFAKKLTLKNVTDYIADVVCKRAESGYNYGVILIPEGLIDFIPEVQQLIAELNEILAHDVVDEAGVWKKKLTPQCLELFELLPLAIQEQLLLERDPHGNVQVAKIETEKMLIQMVETELDQRKQKGAYNAQFKGQFHFFGYEGRCGLPSNFDSTYCYALGYGAGSLLQSGKTGLISSVGNLAAPVEELTVGGTALTALMDVERRHGKFKPVIKKAMVELEGAPFKKFASKREEWALNNRYINPGPIQFVGPVANKVNHTLLLELGVDA

SEQ ID NO: 29367 - protein, 138 aa, Vibrio fischeri ES114
MANGRILHTMIRVGNLDKSIEFYTKVMGMDLLRQNTNEEYKYTLAFLGYGDESQGAVIELTYNWGTEEYDMGTAFGHIAIGVDDIYATCDAIKAAGGNVTREAGPVKGGSTHIAFVKDPDGYMIELIQNSSASAGLEG

SEQ ID NO: 29368 - protein, 833 aa, Agrobacterium tumefaciens str. C58
MSSELTRRNLKAHAAGIAAATAGIALPAAAQPVPGGVSALQIKWSKAPCRFCGTGCGVMVGVKEGKVVATHGDMQAEVNRGLNCIKGYFLSKIMYGKDRLETPLLRKKNGVYAKDGEFEPVSWDEAFDVMAQQCKRVLKEKGPTAVGMFGSGQWTIFEGYAATKLMRAGFRSNNLDPNARHCMASAAYAFMRTFGMDEPMGCYDDFEHADAFVLWGSNMAEMHPILWTRIADRRLGFDHVRVAVLSTFTHRSMDLADIPMVFKPGTDLVILNYIANHIIKTGRVNEDFVRNHTKFVRGVTDIGYGLRPDDPVEVNAANSADPTKTEAIDFETFKEFVSEYTLEKTAAMTGVEAGFLEELAELYADPKRKVMSLWTMGFNQHVRGVWANQMVYNIHLLTGKISEPGNSPFSLTGQPSACGTAREVGTFAHRLPADMTVTNPEHRKHAEEIWRIPHGIIPEKPGYHAVQQDRMLHDGKLNFYWVQVNNNVQAGPNTKNETYLGYRNPENFIVVSDAYPTITAMSADLILPAAMWVEKEGAYGNAERRTHVWHQLVEASGEARSDLWQLVEFSKRFTTDEVWPAEILDANPAYRGKTLYEVLYKDSDVGKFPLSEINADYKNQESSDFGFYLQKGLFEEYAAFGRGHGHDLAPYDAYHEVRGMRWPVVDGKETLWRYREGYDPYVKPGEGVKFYGNKDGRAVIIAVPYEPPAESPDQEFDTWLVTGRVLEHWHSGSMTMRVPELYKAFPGARCFMNADDARKRGLNQGAEIRIVSRRGEIRSRVETRGRNRMPPGVIFVPWFDASQLINKVTLDATDPISKQTDFKKCAVKIEPVA

SEQ ID NO: 29369 - protein, 216 aa, Mycoplasma hyopneumoniae 232
MKRKIISPSLLNIKKSSRLKSTRIFLNLGIKWFHFDFMDGIFVKNVAISIPEIKNIIKKSKEFISDVHLMSVNPEEQIKQLLGYVNFATIHFESRNYAQIKEIISKYSRKIKIGIAIKPETKIEQIYDLLPEIQLVLIMSVEPGKGGQAFIENTYKKIEELSKIIQENNYKIIIQVDGGIKDFNSKKVFDSGADVIVVGTFLAEKPTKLKIKKLIN

SEQ ID NO: 29370 - protein, 514 aa, Vibrio angustum S14
MKDQVIIFDTTLRDGEQALSASLTVKEKLQIAYALERLGVDVIEAGFPVSSPGDFESVQTIAKHIKNSRICALSRAVAKDIDVAAESLKVAEAFRIHTFISTSTVHVQDKLRRSYDDVIDMGVAAVKRARNYTDDVEFSCEDAGRTPIDNLCRMVEAAIDAGANTINIPDTVGYTLPSEFGGIITQLFNRVPNIDKAVISVHCHDDLGMSVANSMAAVQAGARQVEGTINGLGERAGNCSLEEIAMIIKTRQELLGVTTNIKHDEIHRTSKMVSQLCNMPIQANKAIVGANAFSHSSGIHQDGMLKNKNTYEIMTPESIGLKNQALNLTSRSGRAAVKSHMDALGYTEKEYSLDKLYADFLKLADRKGQVFDYDLEALMHFSNLRDEDDYFKLNYLSVQSGSVMATTSIKLLCGDEEKCEAAVGNGPVDALYQCIYRLTGYDIVLDKFDLTAKGEGEDGLGQADIIANYKGRKYHGTGLATDIVEASGQALLHVINSIHRADQIEEIKQRSATH

SEQ ID NO: 29371 - protein, 362 aa, Vibrio angustum S14
MAGSYNIAVLPGDGIGPEVMQQAHKVLNAIEAKFNLTFNRTEYDVGGIAIDNHGSPLPDATLKGCEQSDAVLFGSVGGPKWEHLAPNDQPERGALLPLRKHFQLFCNLRPAQIHRGLEKFSPLRADISERGFDIAVVRELTGGIYFGQPKGREGEGAQEKAFDTEVYYRYEIERIAKIAFESARLRSKKVCSIDKANVLQSSILWREVVEEIAKDYPDVTLTHMYIDNATMQLIKDPSQFDVMLCSNIFGDIISDECAMITGSMGMLPSASLNQDKFGMYEPAGGSAPDIAGKNIANPVAQILSAALMLRYSLGEETAARAIEQAVSQALEAGELTADLASDKPALTTSEMGDKIAAYIQQA

SEQ ID NO: 29372 - protein, 337 aa, Nostoc punctiforme PCC 73102
MIRVAINGFGRIGRNFARCWVGRENSQIDLVAINDTSDPRTNAHLLKYDSMLGKIKGAEISADDNSIIVNGKTIKCVSDRNPEKLPWRDWGIDLIIEATGVFTSKEGALKHVNAGAKKVLITAPGKNEDGTFVVGVNHHDYDHNIHNIISNASCTTNCLAPIAKVLNDKFGIIKGTMTTTHSYTGDQRLLDASHRDLRRARAAAINIVPTSTGAAKAVALVIPDLKGKLNGVALRVPTPNVSMVDFVVQVEKRTITEEVNQALKDAAEGPLKGILDYSELELVSSDYQGSDASSIVDSSLTLVMGNDLVKVMAWYDNEWGYSQRVLDLAELVAEKWQ

SEQ ID NO: 29373 - protein, 467 aa, Pseudomonas putida
MQQAQGLKRGLNARHIRFMALGSAIGTGLFYGSASAIQMAGPAVLLAYLIGGAAVFMVMRALGEMAVHNPVAGSFGHYASTYLGPMAGFILGWTYAFEMVIVAIADVTAFGIYMGFWFPEVARWIWVLGIVFLIGGLNLCNVKVFGEMEFWLSLLKVGAIVAMILAGLGIMAFGFSQVGTGHAVGVSNLFDHGGFMPNGVGGLIASFAVVMFAFGGIEIIGVTAGEAKDPQRVIPKAINAVPLRILLFYVLTLFVLMCLYPWPQIGSEGSPFVQIFSNLGIGSAAAVLNVVVISAAISAINSDIFGAGRMMYGLAHQGHAPRSFGKLSKHGVPWMTVVVMGAALLIGVLLNYLIPENVFLLIASIATFATVWVWLMILLTQVAMRRSMSREEVAQLKFPVPFWPYGPAMAIAFMVFIFGVLGYFPDTQAALIVGVIWVVFLVASYLLWCKPRAGQGQPVAEPVELHR

SEQ ID NO: 29374 - protein, 176 aa, Gossypium hirsutum
LFSFILILTHFLLKSSIRIQVLGWICVAISVSVFAAPLNIMARVVRTKSVEFMPFTLSFFLTLSAVMWFAYGLFIKDLCVALPNVLGFILGMLQMLLYAIHRHSEKVNIEEKKLPAEQMKSINVVLTTLGASEVHPVVLDIHTDDTKEEDNKNNEPTGEPDKQTDVKMEDANESPV

SEQ ID NO: 29375 - protein, 173 aa, Oryza sativa (japonica cultivar-group)
MLEGGNFSNQETLYEVLSVRKDATYDEIRAAYKSAVLNTHPDKAQMALNPLVSSSERNEFLSVQKAWEILRYPKSRAEYDKQLQSSRQNLEIVATEIEIDDMIVESTADSVELLYPCRCGDYFSITSRELGQIGISVREDGEMELHTSDSVPSSVVLGCGSCSLKARLVTNKT

SEQ ID NO: 29376 - protein, 504 aa, Bordetella bronchiseptica RB50
MANQTAQVAHWIGGQAAYGAEHGLQDIHDPATGEVAAQVGLGGGDTVAQAVAAARAAQPAWAAKSPLHRARVLNRFLALLEDNKETLARMISREHGKVISDARGEVMRGIEVVEFACGAPELMKGAMSINVGGGIDNWVQREPLGVVAGITPFNFPVMVPLWMMPMALATGNAFVLKPSPLDASPSLALAEMLGQAGLPAGVASVVQGGVQAVNALIDHPDVKAVSFVGSTAVARQIYERSAREGKRVQALGGAKNHLVVMPDADPEGAADALVGAAFGSAGERCMAISVAVFVGGAAEAVMPHILRKARALKVRRGMQEDAEMGAIVSAAARDRIAAYIASGVDEGASLLLDGREIAAADCGEGCGNGYWLGPTVFDRVQPSMRIYREEIFGPVLACVHVETLEQAIDLINGHDFANGVSLYTDSGTAARAFVQGIEVGMVGVNVPIPVPAAWQGFGGWKQSLFGDLHVYGEEGVRFYTRQKSVMQRWAAKAAGMSFAMPRSG

SEQ ID NO: 29377 - protein, 468 aa, Desulfotalea psychrophila LSv54
MMVRIMKPLRIEKIGGTTMSRFGEVLDNVIFYDSEDIFNRIYVVSAYSGVTNALLEHKKTHQPGIYQTFVQNEACDMAMERLKTTLCEINRGFADIGLDLEVANNFICKRIQDAVEVLHSMANVLSSGYVNRSEMLLAARELLASIGEMHSAFNSANILQNRGYKASYVDLSGWQDSRDMTIDQRILETFTKFDPSDTICIATGYAKGREGIMREFDRGYSEVTFSKIAVLLKASEAIIHKEYHLCSGDPLIIGEDKVHPICNTNYDVADQLADVGMEAIHPKASKQIEIAGISIRIKNSFDPSHSGTLFTKEYICPQSKTEVITGSDKVTCLEVHDTRMVGEVGFDMKIMEVLSAHQVSYINKATNANTIGVIVYDNDCTEELLRDLRAEFELVTDMHTAIVCAIGSNIAKPGILAKATNALATSHINILAVSQTSRQTNMQFIINREHFKEAQRVLHAALCEEGES

SEQ ID NO: 29378 - protein, 431 aa, Rhodopseudomonas palustris CGA009
MLSVELAIVVALIVVNGLLSMSELAIVSSRPARLSILAQRGVRGARQAMKLSEDPGRFLSTVQIGITLVGVLSGAFSGATLGQRLSDWLTASGVPFADIIGFGLVVTLITYATLIVGELVPKQLALRDPEAVAVKVAPAMALLAKISLPVVVVLDISGKAMLALLGQSGEPEDKISEEEIHSLVMEAETAGILEPGERQMIAGVMRLGDRPVGAVMTPRPEVDMIDLSDPPDQIRATFASSPHSRLPATDGDRDDPIGIIQSKDVLEVYLRGETPDFRALVRDAPVIPASADARDALIMLRNASVHMGLVYDEFGGFEGVVSTADILESIVGAFSSEDGPPEPAAVRRDDGSYLVAGWMPVDEFGDLLGMPVPAPRDYHTVAGLVLSHLGALPSVGDKFDFQGWRFEIMDLDHRRIDKILASRLPDDEASP

SEQ ID NO: 29379 - protein, 452 aa, Shigella flexneri 2a str. 301
MSHNVTPNTSRVELRKTLTLVPVVMMGLAYMQPMTLFDTFGIVSGLTDGHVPTAYAFALIAILFTALSYGKLVRRYPSAGSAYTYAQKSISPTVGFMVGWSSLLDYLFAPMINILLAKIYFEALVPSIPSWMFVVALVAFMTAFNLRSLKSVANVNTVIVVLQVVLIAVILGMVVYGVFEGEGAGTLASTRPFWSGDAHVIPMITGATILCFSFTGFDGISNLSEETKDAERVIPRAIFLTALIGGMIFIFATYFLQLYFPDISRFKDPDASQPEIMLYVAGKAFQVGALIFSTITVLASGMAAHAGVARLMYVMGRDGVFPKSFFGYVHPKWRTPAMNIILVGAIALLAINFDLVMATALINFGALVAFTFVNLSVISQFWIREKRNKTLKDHFQYLFLPMCGALTVGALWVNLEESSMVLGLIWAAIGLIYLACVTKSFRNPVPQYEDVA

SEQ ID NO: 29380 - protein, 310 aa, Vigna angularis
MENFPVINLENINGEERKAVLEKIEDACENWGFFELVNHGIPLELLDTVERLTKEHYRKCMEQRFKEAVASKGLEGVQGEIKDMDWESTFFLRHLPHSNISEIPDLSEEYRKAMKDFAQKLEKLAEELLDLLCENLGLEKGYLKKAFYGSKGPNFGTKVANYPPCPKPELVKGLRAHTDAGGIILLLQDDKVSGLQLLKDGQWVDVPPMRHSIVVNLGDQLEVITNGKYKSVEHRVIARTDGTRMSIASFYNPAGDAVIYPAPALLERKTQVIDKVYPKFVFEDYMRLYATLKFQPKEPRFEAMKGVNTV

SEQ ID NO: 29381 - protein, 280 aa, Pseudomonas syringae pv. syringae B728a
MSEDRSSNGQKSWLGKLTQAFVHEPKNRQELLELLREAHQNKLLDSEALAIVEGAIQVADLQVRDIMVPRSQMISIKATQTPREFLPAVIDAAHSRYPVIGESHDDVLGVLLAKDLLPLILKADGDSDDVKKLLRPATFVPESKRLNVLLREFRANHNHMAIVIDEYGGVAGLVTIEDVLEQIVGDIEDEHDVEEDSYIKPLPSGDFLVKALTPVENFNEFFDSTFSDDEFDTVGGLVMNAFGHLPKRNEITEIGAYRFRILSADSRRIHLLRVTPISRP

SEQ ID NO: 29382 - protein, 150 aa, Prosthecochloris aestuarii DSM 271
MIKILKILCPVDFSDASKKSIRYAHEFARGMGASLYLLNVVEPRPMAVDMSLSYVPLEEDLEKAAREDLELIVAAEREKGIVVEADVEIGTPSEIILEKAAELDVNLIILGSHGKTGLSRLLMGSVAESVVRKAQCPVLIVKAEETDFIE

SEQ ID NO: 29383 - protein, 369 aa, Magnetospirillum magnetotacticum MS-1
MAAKKLLILPGDGIGVEVMAQVRRIIDWMARKRKVEFEITEGLLGGAAYDVHGTPYPAETLEAALAADAVLLGAVGGPKWDDLPFDKKPERGLLGIRKDMGLFANLRPATVLDALADASTLKNEVVSGLDIMILRELTGGLYFGQPRGIDTLPDGTRKGYNTLVYTTPEIVRIGRVAFDLARKRNKKLCSVDKANVLECTVLWREEMIKLQKEEYPDVELSHMYVDNAAMQLVRNPKQFDVMVTENMFGDILSDCAAMLTGSLGMLPSASLGEADANGKRKALYEPVHGSAPDIAGKDMANPLATIMSFAMCLRYSFDMVAEADLIETAVKNVLKGGLRTADIMQPGKAKVSTTVMGEAVVRELDKLNS

SEQ ID NO: 29384 - protein, 553 aa, Methylococcus capsulatus str. Bath
MRETIPPRTGADLLVDSLQALGVEYVFGVPGGAILPILNVLADRGPRFIVCRDETGAAFMAQSWGRITGRPGVVLTTSGPGLINAVCGVATATEDRDPLVVITGQVPRAVQFKQSHMNLDSVGLFAPITKWSVEVEEPNTVSEILVNAFRTAQTPCAGAVHVSVPNDMLTAPVTAQALAPAEPAVWGTAPAAVVERAASLLNDAKAPAILLGLRASTPGAAAAVRRFLERHPLPVAMTFEAAGTLSRDLVDQFVGRVGYVLNQPGDEVLRQADLVLTIGYDPIEYEPSAWISPQSQAIHLDALPAAVDRAYHPAAELVGDIAANLAALGSLLRIEDRAGRPAVAAARRRLLEEQARGAALTGMPIHPLRFIHDLRATLDDEATVTCDVGAHEIWMARYFFCYAPRHLLFSMGHQTMGVALPWAIGAALARPGKKVVSVSGDGSFLMTCMELETAVRLKLPIVHIVWKDGGYNLIHSLQMRDYGRSFGAEFGPTDFVKLAEAFGAIGYRIESADGIVPVLNRALAADAPVLIEVPIDYSDNVHLVEAIDASAQH

SEQ ID NO: 29385 - protein, 1063 aa, Rubrobacter xylanophilus DSM 9941
MAASVLIGWLRLEGERAGLYDTATGVLIMTAANVIVVSAIMLWGVRALGRLERGRAAAEEGYRSVFENASEGIFRSTPEGRLLAANPAMARMFGYRSPEELVSEVSDLGRQLWESPQERERFVRRVLEEGSVSGFEARMRRRDGSLLWASLNGHRVTGRDGRLVCLEGTILDITWRRRQQEALEESQRQFRDLFERSVDALLVHDGEGNIVDCNAEACRSLGYTRQELLRMNVRDFATNLLRREDRTPGEPTLWERALSGEPGVVAGVHLGEHRRRDGTTFPVEVRVGPVVYGGRRMILAAARDITERKRIEEELREAKEQAEAASRAKSEFVANMSHEIRTPMNGVIGMAELLLDTPLTPEQREYARTIRSSGEALLAILNDILDFSKIEAGRLSLERIPFEIHKEVEEVVSLLAPRAHAKGLELICFIEPGVPPLIKGDPFRLRQVLTNLIGNAIKFTEEGEVVVSVSLSKEEKSAPAGERGGEIELRFEVKDSGIGIQEEQQKHLFEAFSQADASTTRRYGGTGLGLAISRQLVEMMGGEIGLKSSPKEGSTFHFSARFVLPEEEEEKSPKTPPEEGEGGGARRTREEEERGRRESLAGLRVLVVDDNATNRTILCRQLEAWRMEPKSVGGAQEAIRELEASGTFLASSSSGYDLVILDMQMPETDGLELARRIKSRLQEEEEKRGGAFSALRLMLLTSMDPQTKEKIKASGTVEACLQKPVRQSQLYDAIATLFQKKKEEERPLPLPAHQKEEEKEGKERPLILLAEDNPVNQQVAASMLKKLGYRVELAQNGEEALKKLFPPPSSPPSSSGREEGGGSPKKKYAAVLMDIQMPKMDGLEATRRIRSKEEEGVLRLPRTPIIAMSAHAMQEDRERALKAGMDHYISKPVKKEQLKEALERFVAATEGQKERPSPSSSCPPGRKPQQPEKGGEGAALDPDSLKELDELGEGVFEELCQLFLEDAPRKLAGIKEALRLEAKEGGEKATSSSSFAPREEVGRLSHALKGSAASLGAKRLAGLCQRLGEEAGGAGSEEQLLRLVWEMERELERVRGEIAARLS

SEQ ID NO: 29386 - protein, 449 aa, Escherichia coli
MSEIVVSKFGGTSVADFDAMNRSADIVLSDANVRLVVLSASAGITNLLVALAEGLEPCERFEKLDAIRNIQFAILERLRYPNVIREEIERLLENITVLAEAAALATSPALTDELVSHGELMSTLLFVEILRERDVQAQWFDVRKVMRTNDRFGRAEPDIAALAELAALQLLPRLNEGLVITQGFIGSENKGRTTTLGRGGSDYTAALLAEALHASRVDIWTDVPGIYTTDPRVVSAAKRIDEIAFAEAAEMATFGAKVLHPATLLPAVRSDIPVFVGSSKDPRAGGTLVCNKTENPPLFRALALRRNQTLLTLHSLNMLHSRGFLAEVFGILARHNISVDLITTSEVSVALTLDTTGSTSTGDTLLTQSLLMELSALCRVEVEEGLALVALIGNDLSKACAVGKEVFGVLEPFNIRMICYGASSHNLCFLVPGEDAEQVVQKLHSNLFE

SEQ ID NO: 29387 - protein, 362 aa, Schizosaccharomyces pombe
DPPLTVSSTQRISRPPSLQKSITMVGVEPLYQSNGNEKSSKYNVFSESAHGNHQVLSFSPGSSPSFIEQPSPISPTSTTSEDTNTLEEDTDDQSIKWIRGALIGSGSFGQVYLGMNASSGELMAVKQVILDSVSESKDRHAKLLDALAGEIALLQELSHEHIVQYLGSNLNSDHLNIFLEYVPGGSVAGLLTMYGSFEETLVKNFIKQTLKGLEYLHSRGIVHRDIKGANILVDNKGKIKISDFGISKKLELNSTSTKTGGARPSFQGSSFWMAPEVVKQTMHTEKTDIWSLGCLVIEMLTSKHPYPNCDQMQAIFRIGENILPEFPSNISSSAIDFLEKTFAIDCNLRPTASELLSHPFVS

SEQ ID NO: 29388 - protein, 248 aa, Medicago truncatula
MKFNVANPTTGCQKKLEIDDDMKLRAFWDKRISQEVLGDALGEEFKGYVFKITGGCDKQGFPMKQGVLTPGRVRLLLHRGTPCFRGHGRRNGERRRKSVRGCIVSPDLSVLNLVIVKKGENDLPGLTDVEKPRMRGPKRASKIRKLFNLSKDDDVRKYVNTYRRTFTTKAGKKQSKAPKIQRLVTPLTLQRKRARIADKKKRIAKAKSEAADYQKLLASRLKEQRERRSESLAKKRSRLSTAKQGVAA

SEQ ID NO: 29389 - protein, 563 aa, Clostridium acetobutylicum ATCC 824
MNENLKQDKDSEISKTEDEESSMNTAELVVKCLENENVEYIFGIPGEENLALIKALTKSPIKFITTRHEQGAAFMADVYGRLTGRPGVCLSTLGPGATNLMTGVADANLDGAPLIAITGQVGTDRMHIESHQHLDLVAMFAPVTKWNKQIVRPDTAPEIVRKAFKTAVDEKPGACHIDLPQNIADMPVQGKPLRHTVTDKSFAAYSSIEKAAIAISRAKSPLILSGNGAIRSKASKAVLDMAERLNIPVANTFMGKGIIPFNHPLSLWSMGLAQKDYINRIFEKTDLVIAIGYDIVEYSPKKWNSKGEIRIIHIGEKKAEVNNSYLPEVEVIGDISDSIQEIIRRSDRIETPKQALKIKEDMHKNYEEYSDDQSFPMKPQKVLYDLRRVMGEDDIVISDVGAHKMWIARNYHCYKPNTCIISNGFASMGIAIPGALAAKLVNPDKKVVAVTGDGGFMMNSQELETALRIGTPFVTLIFNDSNYGLIKWKQEERYGESAYINFTNPDFKMYAESMGLKGYRITKAEELIPTLEEAFSQKVPSVIDCAVDYSENLKLSHKLEELK

SEQ ID NO: 29390 - protein, 187 aa, Schizosaccharomyces pombe
MVRYSASPALETKCAKARGAYLRTHFKNSREVAFTINGMSLKKAFIFLDNVKEHKQAVPFRRFNGGVGRTAQGKEFGVTQARWPVKSVKFFYDLLKNAEANAEAKGLDMDKLIIKHVQVNAAPKQRRRTYRAHGRVTAYLSSPSHIEIIVAEEEEAVPKANDTVSRVSLKQGAKARNLAARKAITAA

SEQ ID NO: 29391 - protein, 114 aa, Leptospira interrogans serovar Copenhageni str. Fiocruz L1-130
MKLIVAIIQPHKLEEVKSELTKNEIYRLTVSDVQGYGQQKGKTEVFRGHEYQVNLLRKVRLEIAVNDEFVKPTVDAILKAAKTGDGKIGDGKIFITPLEDVIRIRTGERGSSAI

SEQ ID NO: 29392 - protein, 110 aa, Rubrivivax gelatinosus PM1
MMASELIKHVSDASFDDDVLKSGTPVLVDYWAEWCGPCKMIAPILDEVAKDYGSKLQIAKMNVDENRDVPAKFGIRGIPTLMLFKGGQLAATKVGALNKSQLTAFLDGHL

SEQ ID NO: 29393 - protein, 406 aa, Pseudomonas syringae pv. phaseolicola 1448A
MAIEIKAPSFPESVADGTISKWYKKEGDAVKRDEMLVDIETDKVVLEVLAEADGVMGSITKEEGAIVLSNEVLGTLNDGATASAATAPAAAPASAPAAAPAAAGEEDPIAAPAARQLAEENGINLASVKGTGKDGRITKEDVVAAVEAKKSAPAAAPAAKPAAAAAPVVAAGDRTEKRVPMTRVRATVAKRLVEAQSNMAMLTTFNEVDMTEVMALRSKYKDLFEKSHNGVRLGFMSFFVKAATEALKRFPAVNASIDGSDIVYHGYADVGVAVSSDRGLVVPVLRNAEHMSLAEIEGGIATFGKKARDGKLSIDEMTGGTFTITNGGTFGSMMSTPIVNPPQAAILGMHNILQRPMAVNGQVVIRPMMYLALSYDHRLIDGKEAVTFLVTIKNLLEDPARLLLDI

SEQ ID NO: 29394 - protein, 1809 aa, Zea mays
MATLPFPPPDPSSPLDLSSTPDASSPTSTSPTPVTIPIPAANHLSSSPASAGPSTCGGRSKAQRWCEDDAAGVGAVPLPSRLSYKEALVSSQPPGSHFVGGSAGGGWKTVQSRRGRRLACRPPWPSPRPVPVDLRGRYFNCFSADHRAARCSNRVRCFFCRWPEHRVSECPCRQTNLVAPMRRLVWRPISKEAPTVAFADHAMAGGSTLGGSDAAISGKRRTRRGQRKRRAEPGGGLGGDPLLLSSGNLSPAALDGPRPVRFIGRSRMIDRAELELRHALIVSVVGQEGTGCATEVREALASRFGLDADALRLRRVASGSFLVLFPSEELAVRVISEGPSILVPPLRLHVKRWTRQAFASGGSVLSSLIDVELRGIPAHLWGLETAEVLLGPYCLIQGLHPDSISGEDLSVIRLRAWCRSLMGLPEVLDLHTVEPMVLDEDGVWIPHYWSRGVSLWRGICSHLHRIPLMMSRSRVVGLGGCRGWVIRPHCLGLRCTRGWALVFIPRRRVLDPLMMWGFWLLVMDNSDAVAASVSSDSLAEPVDAPTLPCAAVEKLTAPGVLALCDVVVPDYSPDGASADLAAELREDSLLAVSCVVRASSARWNLKPPVFRVYSRRLRPSILDDQDGPLVQSGLDNSMVISSPLCEFQCLVTKPVDALLPTPQIPKRRKKPLPSNFMPRRSRRVAKFPPELGSEAAAQVCRQLGFCDDNEVISVQDAVKLQEKNGSCWWFTGVYGPHQDNLKSSFLHELREIRDTCVGPWIIGGDFNLIFREEDKNNSNINRAMLGDFRRLINSLDLKEIHLKGRRYTWSNQRDAPTLVKLDHVFCTSCWEDLFSDASLHSNATTSSDHCPLTLNVRGGCMGKRRFHFESFWPKIPGFLEVVGASWSMPVRSSCPLEQVSLKLKRLARALQSWGHKEVGNVRMQLGLVREVLHRLEMAQDIRILSSGEVWLLNLLKQRCLSLASLERTVARLRSRIHYLKEGDANTKFFHSQACYRKKKNFISKLEEDGRLATNHDDMQQILEEYFCNLLGADLQRPFTIYLNNCHRAAMDLSVLEQPFSEEEVRDTIACLPSDKAPGPDGFTGKFYKTCWDIIKVDIMAALNSLYHGNAYKLDLLNSAYLILLPKREDASSAGDFRPISLIHSFAKLVTKILANRLGPYLQDLVVANQSAFIRGRSIHDNFMLVQQSIKFLHKRKISSLLLKLDISKAFDSVSWAFLLEILTHLGFGPVWRNLISNLLFTSTQVLLNGSPGNHIFHRRGLRQGDPLSPMLFVMVMDVLSSLFRVAENRGLLQGLGGADVRSRVSIYADDVVLFIKPIEADLNCAKIILNCFGSASGLVTNMLKSSAIPIRCDGQQVLAGCSVLHCSPAAFPCRYLGLPISDKKLRKCDLKLWIEKIADRLPNWKARLLNLAGRTALVKFVLSAIPTYLLIAINVPRWVIKSIDKIRRGFLWRGRKEVNGGSCLVPWEVVTRPLRLGGLGIPNLKLKSWALQAKWLWLEKTDQSRPWRGLSLPVQRQVRQFFDLSVFTILGNGATTLFWSDRWIHENTIQDIAPEVVGMVGRKAYSSRTVAQALDNWHWVSDIRGALSLSGLQQYLLLWDTLGDVRLSHDADRHVWMHSSSGMFSSKFCYKAFFMGSISFEPWKRLWKSWAPPKCKFFLWLAIRNKCWTADRLRRRGLQHPAVCVLCDQEQETVQHLLCTCSFARQFWHAILVPLCLGDLIPAVDEISFADWWRKALKKVPKFRKKGFNSLIILGSWCIWLTRNKAVFDGVNPSMCFVKSLFLNELSCWERAGAKQLASFGLPAIMSRV

SEQ ID NO: 29395 - protein, 220 aa, Zea mays
  misc_feature (135)..(135): Xaa can be any naturally occurring amino acid
MDSNSWINHPSVFSSRRCQSRSGGGYEDLKGEDDSKSEFICPFCADVFDIVGLCCHIDEEHPVEAKNGVCPVCTKRVGLDIVGHITTQHANFFKVQRRTRLRKGGYSSAYLALKKELREANLQSLLGGSSRFTSXPNIDSDPLLSSFIFSSPSANEPPKKSATSVAEGTLAIKLSLKESLKREIQEAPLSGEDQQKAKKSEFVRGLLLSTILRDDLMMHA

SEQ ID NO: 29396 - protein, 333 aa, Pseudomonas syringae pv. phaseolicola 1448A
MTLRIAINGFGRIGRNVLRALYTQGYRQDLQVVAINDLGDSEMNAHLLRFDTVHGPFSGTVECDKDSLTVNGDRISVSAIRNPAELPWKAQDIDVVFECTGLFTSRDKAAAHLTAGARKVIISAPASGADATIVYGVNHDTLRQSHQIISSASCTTNCLAPVAQVLHRELGIENGLMTTIHAYTNDQNLIDVYHTDPYRARSATQSMIPSKTGAAEAVGLVLPELAGKLTGMAVRVPVINVSLVDLTVTLKRETTVDEVNALLKEASQHSKVLGYNALPLVSHDFNHNPLSSIFDANHTKVSGKLLKVLSWYDNEWAFSNRMLDNCLALHNAE

SEQ ID NO: 29397 - protein, 482 aa, Clostridium acetobutylicum ATCC 824
MFENISSNGVYKNLFDGKWVESKTNKTIETHSPYDGSLIGKVQALSKEEVDEIFKSSRTAQKKWGETPINERARIMRKAADILDDNAEYIAKILSNEIAKDLKSSLSEVKRTADFIRFTANEGTHMEGEAINSDNFPGSKKDKLSLVERVPLGIVLAISPFNYPVNLSGSKVAPALIAGNSVVLKPSTTGAISALHLAEIFNAAGLPAGVLNTVTGKGSEIGDYLITHEEVNFINFTGSSAVGKHISKIAGMIPMVLELGGKDAAIVLEDANLETTAKSIVSGAYGYSGQRCTAVKRVLVMDKVADELVELVTKKVKELKVGNPFDDVTITPLIDNKAADYVQTLIDDAIEKGATLIVGNKRKENLMYPTLFDNVTADMRIAWEEPFGPVLPIIRVKSMDEAIELANRSEYGLQSAVFTENMHDAFYIANKLDVGTVQVNNKPERGPDHFPFLGTKSSGMGTQGIRYSIEAMTRHKSIVLNL

SEQ ID NO: 29398 - protein, 322 aa, Mycoplasma hyopneumoniae 232
MSKKIGILTSGGDAPGMNSAISFLAKSALSLGFEPYLIFDGYSGIIARKILPAKNFPYNGISSFGGTAIGSSRFPEFKKEEVQNKAVEILSEIGISSLVVVGGDGTYNGGYKLHLKGIKVIALPGTIDNDIQFTDYTIGFDTALNTIVETIDKLRDTANSHRRCFVVEVMGRHCQDLALYSAIATGSEILITNTNILTPEEVSQRVLEQFAKGKPSVIVTITENILPNLKEFAAKIEELTKISTRSLEVGHTQRGGRPSAFDRILAAKMAMKAMELINQDKSGLAISYLDGKIQTFDIAKVVSKPVRKTNDLVLEINKINQN

SEQ ID NO: 29399 - protein, 121 aa, Brassica napus
  misc_feature (8)..(8): Xaa can be any naturally occurring amino acid
MAAAGGGXSMLGSMLLFTVVLSLQEVYRGKLASSELFTILGGFTSSLLFLFSLTFIGNLQESSGTKSSWGAVVIAEIIALVAASTVHRVCITTCFLFSAGLLYEMHKISGYMLSESKSKRH

SEQ ID NO: 29400 - protein, 1592 aa, Aspergillus nidulans FGSC A4
MIKSRPGWRFLSSLRAPPTRRFATEARLTSDHVRIVEVGPRDGLQNEKKSISLETKLELISKLAKTGVTTIEAGSFVPAKWVPQMASTAEICEHLLQTPPQSLNAIAYNYLVPNVKGLEGLIKVMDATGASASTPGTKTTPPTTTEISLFAAATEAFSKANTNCTIQESLDRIRPIVALAKTKDIRVRGYVSVALGCPYEGPDVPPSKVADITATLLEMGADEVSVADTTGMGTAPRTMELLQALKAAGIANTDLALHFHDTYGQALVNTIVGLEHGVRIFDSSVGGLGGCPYSKGATGNVSTEDLVHTIHGLGMHTGIDLEEMSRIGQWISDELGRPNESRAGKATIARLQSYLPLLVMPGEQQMLPLPGSPSTSWARFRAQLGALFHGADPNVCVAFWLFGLINNVLYVIILSAALDLVGPNVPKGVVLLADVLPSFGTKLVAPYFIHTVPYSMRIVICVVLSALGMLVVALSPAYVDGGSISSKLAGIILASLSSGIGELSFVGLTHFYGPFSLAAWGSGTGAAGLVGAGAYALATTSLGLRVKTTLMTSAFLPFVLAVSFFFVLPRARIQLHSVYGDVEEHADDSVLSNNDDGEREGLLSSSAHSAVSLKSTYRVRGWHRLRANLRRARGLFFPFMLPLLLVYIAEYTINQGVSPTLLFPLKETPFTHFRAFYPAYNAIYQVGVFISRSSTPFFRIHDLYLPSILQIINLIVLTLHSLFNFIPNVYLIFIVIFWEGLLGGLVYVNTFAEIGDRVPREDREFSLSATTVSDSGGICIAGFLGMVFEQIGKLRWIDRSAIYIYACSFSYLSRVAMIDHVLGRPSTRFRKVQVIAVFLFWSYYLLRGNKHGPPVVRGISARLSRRLTVWQTTVVVVLWLYFCRNFAKIVGLESPEPLANLYSRSFFRATWITTALDAGFWTAMRVRPKWLRDILSLIGTVYYLFAAEQADDKVRRVRATLTVEHLRVSWNKGTTPYLWALASLVRPRLTRYPPRAIRIPRPRQSIYTEPTNAWLYFDGPMSALREQTCIVLDIPGGGFVSMTPRHSEDRLLAWAGKTKLPILSLNYKKAPEYPYPYALNECYDVYHSIFTTRGRCLGLAGDVPPRIILTGDSAGANLAVGTALMVLQSSDRRPSLAQGQSSLPAPDGLVLSYPALNMKIESWMSEEHVALIQDKSTNRSVVQRKDMDYKRLTPFATPGASSDDLQKNSYLSEPDLETGALVEEAKGSKIDEDEEALDMQTAYLANNQPKKIQTRLAVSSMISYVNDRILSPEMMRAMVILYIGPHNRPDFNTDYLLSPVLAPEALLAQFPKTYIITGERDPLVDDTVVFAGRLRQAKLRRFQERQELGLEKSQRRFNEKDYVEVSLLPGISHGFMQMAGFFPDSWKHIYRCAAWIQTLVDMANIKKSSPSTSSRNLSNSHTSKSDFNQATRPSHKRTLTGESSADEDKPLEMSIGKMGPLTPMVCNSTEGDSDGHVPTPMVEAETETEVETEQSPRTSDITTSSSKADDQKSTGGRRPRGRHARSTGLGRRRTFAPSNINIAPEWASDPVSPMRPRESSLCSLPSEEDLLRRRMSGLAGGLMGIGEGARTP

SEQ ID NO: 29401 - protein, 917 aa, Pseudomonas syringae pv. syringae B728a
MLTKLGIKGRVLLLTILPASLMAAMLGGYFTWMQLSELQSQLLQRGEMIAQDLAPLAANALGRKDKVLLSRIATQTLEQTDVRAVSFLDTDRTVLAHAGPTMISPSPIGSGSQLLSSTGTDATRYLLPVFGSQRHLTSPIIPAEADTLLGWVELEISHNGTLLRGYRSLFASLLLILTGLAFTATLAVRMSRTINGPMSQIKQAVSQLKDGNLETRLPPLGSRELDELASGINRMAATLQNAQEELQLSIDQATEDVRQNLETIEIQNIELDLARKEALEASRIKSEFLANMSHEIRTPLNGILGFTHLLQKSELTPRQFDYLGTIEKSADNLLSIINEILDFSKIEAGKLVLDNIPFNLRDLLQDTLTILAPAAHAKQLELVSLVYRDTPLALSGDPLRLRQILTNLVSNAIKFTREGTIVARAMLEDETEEHAQLRISVQDTGIGLSSQDVRALFQAFSQADNSLSRQPGGTGLGLVISKRLIEQMGGEIGVDSTPGEGSEFWISLKLPKAREDKEESLNIPLGGLRAAVLEHHDLARQALEHQLEDCGLQTIVFNNLENLLNGVTAAHETPAAIDLAVLGVTALEISPERLRQHIWDLENLNCKVMVLCPTTEHALFQLAVHDVYTQLQAKPACTRKLQKALSELIAPRAVRADIGPPLSSRAPRVLCVDDNPANLLLVQTLLEDMGAEVVAVEGGYAAVNAVQQEAFDLVLMDVQMPGMDGRQATEAIRAWEAERNQSSLPIVALTAHAMANEKRSLLQSGMDDYLTKPISERQLAQVVLKWTGLALRNPAPERQNEALEVHVGPLVLDHEEGLRLAAGKADLAADMLAMLLASLDADREAIRVARANQDVHALIERIHRLHGATRYCGVPQLRSACQRAETLLKQNAPHTEEALNDLDKAIIRLEAEARVMA

SEQ ID NO: 29402 - protein, 332 aa, Ehrlichia ruminantium str. Gardel
MKNLTVREALCAAIREEMERDHTVLIMGEEVGEYQGAYKVTQGLLEQFGPDRVIDTPITEHGFAGIGIGAAFSGLRPIVEFMTFNFAMQAIDQIINSAAKTSYMSGGQLSCPIVFRGPNGAAARVGAQHSQCYASWYAHIPGLKVIAPYFAADCKGLLKAAIRDPNPIIFLENEITYGHTHEVPDVVLTKDYISEIGKAAIVKEGTDITITAFSLQVKSALEAAELLEKEGINAEVIDLRTLRPLDVEQILNSIKKTNRIISVEEGWPYSGIGSEIAALTMEHAFDYLDAPMIRITAKDIPLPYAANLEKLALPQIQDILEAARTSCIRNYK

SEQ ID NO: 29403 - protein, 550 aa, Methylococcus capsulatus str. Bath
MRGPLLLNYPLFNKGPAFPEQERRELGLLGLLPPHVDTLETQVERAYEAFRAKPTDLERHIYLRALQDENEVLFYRLMQDYIGETMPVVYTPTVGEACQRFSHIYRHPRGLFIAYPEREHIDELLANTAQREVDVIVVTDGERILGLGDQGAGGMGIPIGKLALYTLCGGIHPARTLPVLLDVGTDNPDLLNDPLYMGWRHPRVRGTEYDEFVERFVQAVMRRYPNVLLQWEDFAQANAGPLLERYRDRLCTFNDDIQGTAAVATGTVLAAVKVTGTRLRDQVVAVFGAGSAGCGIAEQICAAMVRDGLSETEARSRCFLIDRSGLLREGLSGLPPFQQAFAQPAARLAGWRVDRAGTIGLAEVVNNARPSVLIGVSGAAGAFTESIVKAMADYTPRPIILPLSNPTSRCEALPAQILAWTEGRALVATGSPFADVAWEGRTIPIPQCNNSYIFPGLGLGILAIGARRVTPGMFMAAAQALANASPAATDPHGPLLPPLTAIRNVSRLIALAVAKEAVAAGVAAPASDADLERMVDERMWTPAYARLTGC

SEQ ID NO: 29404 - protein, 394 aa, Aspergillus oryzae
MSGFFTYRQFSLYDTPSLANQVAVVTVSVKTSPTYNSLGPLGSGREAASNSLFQYLLHPLTRVANVNLEITAQLLLHGIETVYVLARSHDKYIRAQEEWQRRIGGSLGKGDTRVQFIQCDLADIVAAKSAANELKHKTDRLDIMICNAATIYNRPFVDVPTPAKAIGVSTNYERSPQGIEQVFASNCVGHQVLATNLLPLMKRTINQGKASNGRIAVASSSMHVFCRELNLDLLTSPTRLKPAYIDGVWRYARAKVGNILFARELSLRLMQEEDPASSKIYVNAFFPGNIVTDQWSVWDEYIGEALGSLFRLLFSIIGQSLEDGAANAIYLAASPKVISNSTRGQYFIPIAKPYKTTAIASDMKLARDLWDWTEAKAAEALGPEEQAKTRTVDG

SEQ ID NO: 29405 - protein, 424 aa, Streptomyces aureofaciens
MTRRRVAVTGVGVVAPGGIGAPAFWDLLSNGRTATRGITLFDPSGFRSRIAAEVDFDPSEHGLSEDETARADRYIQFALVAAREAVRPTSGLELDDESAWRPGALLGTALGGTTRLEHDYVDVSRHGDWWDVDHRLSSPFLHRAFTPATLASAVAEQTGARGPVQTVSTGCTSGLDAVGYAVHSIQEGRMDVCIAGASDSPVSPITVACFDAIKATSANNDDPAHASRPLIPDRNGFVLGEGVAVLVLEELEHARARGRDVYCEIGGYATFGNAHHMTGLTTEGLEMARAIETVLAQARIGSGEIDYVNAHGSGTKQNDRHETAAVKRVLGDHAYKTPMTSIKSMVGHSLGAIGAIELAACVLAMTHHVVPPTANYETPDPECDLDYVPRTARSHTLRHVLSVGSGFGGFQSAVVLTSQEGTAA

SEQ ID NO: 29406 - protein, 433 aa, Saccharomyces cerevisiae
MATDTERCIFRAFGQDFILNKHFHLTGKIGRGSHSLICSSTYTESNEETHVAIRKIPNAFGNKLSCKRTLRELKLLRHLRGHPNIVWLFDTDIVFYPNGALNGVYLYEELMECDLSQIIRSEQRLEDAHFQSFIYQILCALKYIHSANVLHCDLKPKNLLVNSDCQLKICNFGLSCSYSENHKVNDGFIKGYITSIWYKAPEILLNYQECTKAVDIWSTGCILAELLGRKPMFEGKDYVDHLNHILQILGTPPEETLQEIASQKVYNYIFQFGNIPGRSFESILPGANPEALELLKKMLEFDPKKRITVEDALEHPYLSMWHDIDEEFSCQKTFRFEFEHIESMAELGNEVIKEVFDFRKVVRKHPISGDSPSSSLSLEDAIPQEVVQVHPSRKVLPSYSPEFSYVSQLPSLTTTQPYQNLMGISSNSFQGVN

SEQ ID NO: 29407 - protein, 207 aa, Pinus thunbergii
DREGAGKHLQAGAKKVLITAPGKGDIPTYVCGVNEDKYNPAEEIISNASCTTNCLAPFVKVLDQKFGIIKGTMTTTHSYTGDQRLLDASHRDLRRARAAALNIVPTSTGAAKAVALVLPSLKGKLNGIALRVPTPNVSVVDLVVQVEKKTFAEEVNAGFRESADKELKGILAVCDEPLVSIDFGCSDVSSTVDSSLTMVMGDDMVKV

SEQ ID NO: 29408 - protein, 252 aa, Prochlorococcus marinus subsp. marinus str. CCMP1375
MSIFVGNLPFRAEQEDVIQLFAPYGEVANCSLPLERDTGRKRGFAFIEMADEAAEAAAIEALQGAELMGRPLRINKAEPRGGGGGGRGGGYGGGGRGGYGGGGGYGGGGGYGGGGYGGGGGQGGYGGGGQGGYGGGGQGGYGGGGQGGYGGGGQGGYGGGGQGGYGGGGQGGYGGGGQGGYGGGGQGGYGGGGQGGYGGGQDTEQRASGAQGWEDRSYGSSDSSERDDTRSKRRRGASSEADQDADYGGAEG

SEQ ID NO: 29409 - protein, 254 aa, Nocardia farcinica IFM 10152
MSDTLRVERREAVTVLTVDRPRARNAIDLATAQAIEAAVDAFEADADARVLVLTGSGGTFSAGMDLIAASKGEMPITQRRGPLGITAAPPSKPMISAVEGYALAGGFELAMAGDLIVAARDAQFGLPEVRRGLVAAAGGVLRLTQRLPRPIAAELALTGGRIGAERLYQLGMVNRITEPGEALATALGLAAEIASAAPLAVAASKRIIDESPDWSSGEAFAKQGEVALPALVSKDAAEGALAFAEKREPRWQGR

SEQ ID NO: 29410 - protein, 321 aa, Ehrlichia canis str. Jake
MIHTYKTKVLIIGSGAAGCTAAIYAARANLEPILITGMCPGGQLTITTDVENFPGFAHAVQGPDLMEQMKQQAHNSGANVISDEIKEIHTDVYPFKCIGIFGDQYIAESIIIATGAQAKWLNIKSEETFKGRGVSACATCDGTFFTGSDVAVIGGGNTAVEEALYLTRHATKVFLVHRRDKLRAEPIMQERLLNNNKIQVIWDSVVEEILGNDENGTVEAVKLKSVKTGQFTTIKVKGVFIAIGHTPNTQILKNKDNSSIVELDQEGYIITKHGSTITSHPGIFAAGDVQDKIYRQAVVAAGSGCMAALEAAKFLSENTMH

SEQ ID NO: 29411 - protein, 326 aa, Chaetosphaeridium globosum
MAEVLLFEALRDALDEEMQRDPSVLVMGEDVGHYGGSYKVTKGFHEKYGDLRLLDTPIAENSFTGMAIGAAMTGLRPIVEGMNMGFLLLAFNQIANNAGMLHYTSGGNFKIPIVIRGPGGVGRQLGAEHSQRLESYFQSVPGLQMVACSTPYNGKGLLKSAIRNDNPVIFFEHVLLYNLNENLIEQEYLLCLEKAEVVRPGNDITILTYSRMRHHVLQAAKVLVNKGYDPEIIDILSLKPLDMGTISLSVRKTHKVLIVEECMRTGGIGASLRAAILEDLFDYLDAPIQCLSSQDVPTPYSGPLEELTVIQPNQIIQAVEEMCKIE

SEQ ID NO: 29412 - protein, 896 aa, Pseudomonas viridiflava
MAAVLGGYFTWMQLYELQSQLLQRGEMIAQDLAPLSANALGRKDKILLTRIATQTLEQSDVRAVSFLDTDRSVLAHAGPTMISPSPIGSSTQLLNSSGNDATRYLLPVFGHQRHLTSPIIPAEADTLLGWVELEISHNGTLLRGYRSLFASLLLIFTGLAFTAILAVRMSRTINGPLSQIKQAVSQLKDGNLETRLPPLGSRELDELASGINRMAATLQNAQEELQMSIDQATEDVRQNLETIEIQNIELDLARKEALEASRIKSEFLANMSHEIRTPLNGILGFTHLLQKSELTPRQYDYLGTIEKSADNLLSIINEILDFSKIEAGKLVLDNIPFNLRDLLQDTLTILAPAAHAKQLELVSLVYRDTPLALSGDPLRLRQILTNLVSNAIKFTRQGTIVARAMLEDETEEHAQLRISVQDTGIGLSSQDVRALFQAFSQADNSISRQPGGTGLGLVISKRLIEQMGGEIGVDSTPGEGSEFWISLNLPKAREDREETANQALEGLRAAVLEHHDLARQALEHQLEDCGLQTVVFTNLENLLNGVTAAHETPQAIDLVVLGVTALEISPERLRQHIWDLENLNCKVMVLCPTTEHALFQMSVHDVYTQLQAKPACNRKLQKALSELVAPRAVRTDVALPLSSRAPRVLCVDDNPANLLLVQTLLEDMGAEVVAVDGGYAAVSAVQQEAFDLVLMDVQMPGMDGCQATEAIRAWETERNQTSLPIVALTAHAMANEKRSLLQSGMDDYLTKPISERQLAQVVLKWTGLALRNPIPERQTESSNAHVGPLVLDHEEGLRLAAGKPDLAADMLAMLLASLDADREAIRAARANDDIQGLIERVHRLHGATRYCGVPQLRTACQRAETLLKQNAPHTEDALDDLDKAITRLEAEARVTA

SEQ ID NO: 29413 - protein, 130 aa, Kluyveromyces lactis NRRL Y-1140
MAASLHPKIVKKHTKKFKRHHSDRYHRVSENWRKQKGIDSVVRRRFRGNISEPTIGYGSNKKTKFMGPDGRKVVLVSNVKGLTPLLMHTKTFAAEIAHNVSSKNRIAILAEAKKNGIKVTNAKARLALEA

SEQ ID NO: 29414 - protein, 312 aa, Glycine max
MASQIREWSGINTFAPATQTKLLELLGNLKQENVNSLTILVMGKGGVGKSSTVNSIIGERVVSISPFQSEGPRPVMVSRSRAGFTLNIIDTPGLIEGGYINDMALDIIKRFLLNKTIDVLLYVDRLDVYRVDNLDKLVAKAITDSFGKGIWNKAIVTLTHAQFSPPDGLPYDEFFSQRSESLLKVLRSGARIKKEAFQAASIPVVLVENSGRCNKNDSDEKVLPNGTAWIPNLVQTITEIALNKSESIHVDKNLIEGPNPNQRGKLWIPLVFALQYFLIMKPIKGLIEKDIANERKPTWERRDAAFRKRDLY

SEQ ID NO: 29415 - protein, 112 aa, Corynebacterium efficiens YS-314
MKLITAIVKPFTLTDVKEALEQVGVQGMTVTETQGFGQQKGHTEVYRGAEYAVDFVPKIKIEVVVSDAQLDEVVEAIVTTARTGKMGDGKVWVTHVEELIRVRTGERGDEAL

SEQ ID NO: 29416 - protein, 506 aa, Arabidopsis thaliana
MASSLLTSSVMIPTTGSTVVGRSVLPFQSSLHSLRLTHSYKNPALFISCCSSVSKNAATSSTDLKPVVERWPEYIPNKLPDGNYVRVFDTTLRDGEQSPGGSLTPPQKLEIARQLAKLRVDIMEVGFPGSSEEELETIKTIAKTVGNEVDEETGYVPVICAIARCKHRDIEATWEALKYAKRPRILVFTSTSDIHMKYKLKKTQEEVIEMAVSSIRFAKSLGFNDIQFGCEDGGRSDKDFLCKILGEAIKAGVTVVTIGDTVGINMPHEYGELVTYLKANTPGIDDVVVAVHCHNDLGLATANSIAGIRAGARQVEVTINGIGERSGNASLEEVVMALKCRGAYVINGVYTKIDTRQIMATSKMVQEYTGLYVQAHKPIVGANCFVHESGIHQDGILKNRSTYEILSPEDIGIVKSQNSGLVLGKLSGRHAVKDRLKELGYELDDEKLNAVFSLFRDLTKNKKRITDADLKALVTSSDEISLEKLNGANGLKSNGYIPVPQVSSNV

SEQ ID NO: 29417 - protein, 269 aa, Bordetella bronchiseptica RB50
MSAADQPPRYGTLTLQTDGALAILTLDRPAALNAIDIAMARDLQAAARWLQDRAALRVVLLRGAGKAFCAGGDIALFQGPPEEIRASLRALFTPLNDCVARIAAMDQLWLADVHGVAAGAGLSLALACDLAIAADDARLVTAYLKLGATPDAGMTHALAHLLGRRRALALLLRAEPIDAAQALQWGLVDRVAPAAERADQALAYARELAAHAPHGVAAAKRLLRQAPATSLEQQLEDEAAAFLAAAGRADFAEGVQAFLAKRPPRFTGA

SEQ ID NO: 29418 - protein, 511 aa, Glycine max
  misc_feature (305)..(305): Xaa can be any naturally occurring amino acid
MYRNAASRLRAIKARSCSSSSRVPASARFASSVATQQSSSSGLGGLFGWLTGDRTSSLPSLGFPLPGVTLPPPLPDYVAPGKTIITTLPNGLKVASETSPSPTASIGLYVDCGSIYESPISFGATHLLERMAFKTTRNRSHFRVVREVEAIGGNVQASASREQMGYTFDALKTYVPEMVELLVDCVRNPVFLDWEVNEQLLKVKAEIGEASKNPQDLLLEAIHSAGFSGALANPLLASESALNRLNGTILEEFVAENYTAPRIVLAASGVEHEELLSVAEPLLSDLPSVPRLEEPKSVYTGGDYXCHSESGRTHFALAFELPGGWHKLKDAMILTVLQMLLGGGGSFSAGGPGKGMYSRLYLNVLNEYPQVHSISAFNNIYNGTGIFGIQVTTGSDFVSKAIDIAANEILGVATPGQVDQAQLNRAKQATKSAILMNLESRMVVSEDIGRQILTYGERKPVEDFLKAVDEVTSKDITSISQKLICSPLTMASYGDVLYVPSYESVSLKFRS

SEQ ID NO: 29419 - protein, 186 aa, Synechocystis sp.
RGLSFQDLIQEGSLGLIRAAEKFDHEKGYKFSTYATWWIRQAITRAIADQSRTIRLPVHLYETISRIKKTTKLLSQEMRRKPTEEEIAEKMEMTIEKLRFIAKSAQLPISLETPIGKEEDSRLGDFIEADGETPEDEVSKNLLREDLENVLDTLSPRERDVLRLRYGLDDGRMKTLEEIGQIFNVT

SEQ ID NO: 29420 - protein, 260 aa, Triticum aestivum
  misc_feature (43)..(43): Xaa can be any naturally occurring amino acid
  misc_feature (214)..(214): Xaa can be any naturally occurring amino acid
NHLPLHSKNDISSGVCNGADIPTYVVDPDKGAIQRMTSPTLRXAGGAANCLRPFANVLAAKGKGVYQTINTTHSYTGDQRLLDPAPRDLRRARAAALNIVPTSTGAAKAVSLVLPQLKGKLNGIALRVPTPNVSVVDLVINTVKTGITADDVNAAFRKAADGPLKGILDVCDEPLVSVDFRCSDVSTSIDASLTMVMGDDMVKVVAWYDNEWGXYSQRVVDLAHLVAAKWPGAGTGGSGDPLEDYCKTDPNAVECKVFDE

SEQ ID NO: 29421 - protein, 113 aa, Enterobacter gergoviae
SDFAGGTVVHINAAVAGLVGAYMMGKRVGFGKEAFKPHNLPMVFTGTAILYVGWFGFNAGSASAANEIAALAFVNTVVATAAAILAWTFGEWALRGKPSLLGACSGAIAGLVA

SEQ ID NO: 29422 - protein, 402 aa, Sinorhizobium sp. BR816
MVRSRIVITGLGGICGMGVNVPSIWEAMRAGRSAIREIMTAPLRQSRIRTGAEIKQLPEVEFDRKRLSTMDRYSLLAVLAAGEALRQSGIVVDKTNTDRIGAVVGTAIFGAETLEENYRGLFISGKSHTNVFAVPRAMPGAPASQVSMVHGVRGPVFGVTSACSSSNHAFISAIDQLRLGRADVMLAGGTDAPLAYGVLKAWELRAVARETCRPFSADRNGLVLGEGAAMAVLETYEHAVARGAPILAELAGTGMSADAFDIVAPTVEGPVAALKACLADAGLLPEDIDYVNAHGTGTRYNDRLETQAIRRVFGNHADILSVSSTKSMHAHCMGASGALELIACVMALREGIIPPTANYREKDPECDLDVTPNTARERKVRAAISNFFFFGGTNAVLAITPA

SEQ ID NO: 29423 - protein, 137 aa, Zea mays
MQTMEGRQYYQNPEGTNHSSSMVVPHSPWHSPVPYLFGGLAAMLALIAFSLLILACSYWRLTGTAERDLEAGDDAKPEGDTHKTKTTELPEKFLVIMAGDVKPTYLATPANRSEQSCTCGDHKEEAGSNVLRQSTGT

SEQ ID NO: 29424 - protein, 268 aa, Burkholderia xenovorans LB400
MIELDYAHDGAVAQLTLKRPPANAFTPEGLLQLQQSVERLNGEARVRAIVIAGDGPRFFSAGADLNTFADGNREVARTAAARFGAAFETLQNARPVVIAAINGYAMGGGLECALACDIRIAEQHALLALPETAVGLLPCGCGTQTLPWLVGEGWAKRMILTGERVDAATALRIGLVEEVVEKGAAREAALTMAARVATLSPQAVGFSKTLIHQARNGVPRAAALALERERFVDLFDGADQREGVNAFLEKRAPRWQVTQAAPADGETH

SEQ ID NO: 29425 - protein, 534 aa, Mycobacterium gastri
  misc_feature (475)..(475): Xaa can be any naturally occurring amino acid
  misc_feature (509)..(509): Xaa can be any naturally occurring amino acid
AEKQRLVAGVAAQYECLAGDTLVWTANRGQVPIKEIEFGDRVFSYDESAERFVVAPVKASAQTDTRLTYEVKTTRRSVRATDNHPMLVLRDERKEGRQRARYARRWVTVGQIKPGDFIAVPRAVPNFGVAEQLPSVAGLTTPATSSADLMWLLGLYVGDGNLHLSTKTYRVQFAIPATDRELRAELTRVIKDLFGLRCIEADEYRVVVNSKALTEWIAALGFGGLSLTKRVPDWVYGLPVDQRLAFLGGWVDADGYVSPDKSGSILLTCANQALIGQARELAELAGLRAGGPWSFTQPYRHAPDRMQIAWRLGISGDFERLGCRNPKRTDRFGRRRYMHSSSGAHGTTIRAHCNDWLGFERVKAVEPYAVEPVYDIEVDGPHNFVAEGLVVHNSEVVYHQIREDLEAQGVIFLDTDTGLREHPDVFKQYFGTVIPAGDNKFSALNTAVWSGGSFIYVPPGVHVDIPLQAYFRINXENMGQFERTLIIVGENAYVTYVEGCTAPIYKSDXLHSAVVEIIVKPGGRCRYTTIQNWS

SEQ ID NO: 29426 - protein, 247 aa, Saccharomyces cerevisiae
MPKLVLVRHGQSEWNEKNLFTGWVDVKLSAKGQQEAARAGELLKEKKVYPDVLYTSKLSRAIQTANIALEKADRLWIPVNRSWRLNERHYGDLQGKDKAETLKKFGEEKFNTYRRSFDVPPPPIDASSPFSQKGDERYKYVDPNVLPETESLALVIDRLLPYWQDVIAKDLLSGKTVMIAAHGNSLRGLVKHLEGISDADIAKLNIPTGIPLVFELDENLKPSKPSYYLDPEAAAAGAAAVANQGKK

SEQ ID NO: 29427 - protein, 188 aa, Cicer arietinum
STKADASESDLESWIERLLNQLKQVNSQMQAWVSSGGSEMVSHTLNRHQEIFQDLTQEFYRLRSNLRAKQEHASLLDDFKEFDRTRLDLEEGSGSEQQTLLKERASISRSTGQMDTVISQAQATLGALVFQRSTFGGINSKLSNVSSRLPTVNNILSAIKRKKSMDTIILSLVGSVCIFLIFIYWLTK

SEQ ID NO: 29428 - protein, 387 aa, Arabidopsis thaliana
SEAANIANPPAKDSSTPDDDSNEDSEDYKPATKKAAHAAANAASSSYSSDEDSDDESEHEKPAHTYADTTASKKSSGTRSSESEEDESEDEEETPKKKSSDVEMVDAGKSSAKQPKTPSTPAAGGSKTLFAANLSFNIERADVENFFKEAGEVVDVRFSTNRDDGSFRGFGHVEFASSEEAQKALEFHGRPLLGREIRLDIAQERGERGERPAFTPQSGNFRSGGDGGDEKKIFVKGFDASLSEDDIKNTLREHFSSCGEIKNVSVPIDRDTGNSKGIAYLEFSEGKEKALELNGSDMGGGFYLVVDEPRPRGDSSGGGGFGRGNGRFGSGGGRGRDGGRGRFGSGGGRGRDGGRGRFGSGGGRGSDRGRGRPSFTPQGKKTTFGDE

SEQ ID NO: 29429 - protein, 1014 aa, Burkholderia pseudomallei K96243
MPGKLKELLIQPFKLNHRKALFDPRRMLAHQRLLTYGGAIGISAFILFCLLLMIRMEAMDYVSNARSEFLIQQSKLTIKLQIRRTALMRAVMHAEGLWNRRIEPSTELLSQFDAHQGYAVLHTPQGAPAALAVGIPAPGRSASAFAPYLALLETQLLMGDGQSPLPDDRVEGYSFSPDGTYLSLLWSREDQAPEAFIESHSASGLIGDAMRGIRYLRDASTIVPLRADRRTVWLPPHPDPLTGKPMIRIVQPAIDATGKLFAIYVRSLPLDMFYSNLNDAPAGSTLTIVDRKGNVILGSSNQHGGDGGATASALGIRSLGDGFGGLVERYQDGMFVTSDQLPGTDWVLVHAYSWKTIAAALALRFSLVTGLVAGIIVMLWLFAIQFDRKGLIPNYRRAQRLLESEVLNRTILRTAPVGLGLLSAQDGSVLLQNNAMLELSARTSDEPLPIRLWEAYRHAVGRSSDEDGALLQHDLAIEREGANPVYLQANVVAARYRGANVLLCTLLDISLRKESELKLKEARIAADQANKAKSTFLATMSHEIRTPLNAIIGNLELLRRSPLSEQQSERLHVVESCSNALLHIINDILDLSKVESGQMTLENIPFDIHALLQETVDAYAPLAESKGLALLSSIGEGVARHYAGDPTRIRQVLSNLIGNAIKFTERGHISIDVHRAKAARDGSAIEIWVNDTGIGIRPDRIATLFDVYTQADASIHRRFGGSGLGLPLCQRLVTIMGGSIEIDSLPDFGTTVTVALPLREARHATALSNGPAARRRNATALARPTLHVLVAEDHPANRALLRDQLEALDHRVDVVENGREALRAFGEHQYDIVLTDLGMPELDGYGFARFANKMRAGTPIVAMTAHATDEDYQRSKKVGIAEIVLKPLSLTTLEKVLQRHAMRAPAEEIVTAAGPGPAHAEPRMRALPPAVAAALRTATLQSIDKIAQALAARNFETIRQELHSIKGGFALTGNRLLIARCAATEELAEAEDLDTLRAAWRKLEASLLEALERL

SEQ ID NO: 29430 - protein, 396 aa, Bradyrhizobium japonicum USDA 110
MAKAKFERNKPHCNIGTIGHVDHGKTSLTAAITKILAETGGATFTAYDQIDKAPEEKARGITISTAHVEYETKNRHYAHVDCPGHADYVKNMITGAAQMDGAILVVSAADGPMPQTREHILLARQVGVPALVVFLNKCDMVDDPELLELVELEVRELLSKYEFPGDKIPIIKGSALAALEDSDKKLGHDAILELMRNVDEYIPQPERPIDQPFLMPVEDVFSISGRGTVVTGRVERGIVKVGEEIEIVGLRATQKTTVTGVEMFRKLLDQGQAGDNIGALLRGTKREDVERGQVLAKPGSVKPHTKFKAEAYILTKEEGGRHTPFFTNYRPQFYFRTTDVTGVVHLPEGTEMVMPGDNIAMEVHLIVPIAMEEKLRFAIREGGRTVGAGVVASIIE

SEQ ID NO: 29431 - protein, 418 aa, Escherichia coli
MRGSHHHHHHGSMKRVVITGLGIVSSIGNNQQEVLASLREGRSGITFSQELKDSGMRSHVWGNVKLDTTGLIDRKVVRFMSDASIYAFLSMEQAIADAGLSPEAYQNNPRVGLIAGSGGGSPRFQVFGADAMRGPRGLKAVGPYVVTKAMASGVSACLATPFKIHGVNYSISSASATSAHCIGNAVEQIQLGKQDIVFAGGGEELCWEMACEFDAMGALSTKYNDTPEKASRTYDAHRDGFVIAGGGGMVVVEELEHALARGAHIYAEIVGYGATSDGADMVAPSGEGAVRCMKMAMHGVDTPIDYLNSHGTSTPVGDVKELAAIREVFGDKSPAISATKAMTGHSLGAAGVQEAIYSLLMLEHGFIAPSINIEELDEQAAGLNIVTETTDRELTTVMSNSFGFGGTNATLVMRKLKD

SEQ ID NO: 29432 - protein, 565 aa, Staphylococcus capitis
MNNNKIKHSFVLTGFAFMLSTPLFDNHAHAAEENIQPISSNNDINKAESENQTFSNDNSISHQPQTNENNINPLATSENDENGESDSDAINDLNSDSDNDTDSDSDSNSDSDSDSDSASDSDSDSDSDSDSDSASDSDSDSDSDSYSDSHSDSDSDSDSNSDSASDSDSDSDSDSDSDSDSASDSDSDSDSDSDSDSGSDSDSGSDSDSASDSDSDSASDSDSDSDSDSGSGHDHTSDHGHDNPSGGGSDDNSHPGGGHSGSHHNNPGSSNGNGSGDNHPSEGNDNSSSSGHNNGSGDDNSNQSGEHHPSNSNNNEQPSSNHTGGNSSNTNHHASNNSSTIHPEDSNGGLLNPNKGNEDNENSSNGGAPLKRNSNDKDDLNYSQSNHQTPNYDRNQFIWNRSGSVINHRSNSQNFNKDEQSKDSEENSLLDRFRSLASGAYKYNPFLINQVRNLDTENGEITDSDIYSLFKKQNFSGNEYLNSLQKGSNYFRFQYFNPLNASKYYENLDEQVLALITGEIGSMPDLKKPNDKDKGSRSAFKNHSRTMKSLQTTTSNPMITTKTKN

SEQ ID NO: 29433 - protein, 363 aa, Vibrio fischeri ES114
MTNKTYKIAVLPGDGIGPEVMEQAHKVLDAIEKKHAISFSREQHDVGGIAIDNHGCPLPESTVKGCEESDAVLFGSVGGPKWEHLPPNDQPERGALLPLRKHFQLFCNLRPAQIHKGLENFSPLRADISERGFDIVVVRELTGGIYFGQPKGREGEGPQEKAYDTEIYHRYEIERIAKIAFESARLRNKNVYSIDKANVLQSSILWREVVEEVAKGYPDVTLNHMYIDNATMQLIKDPSQFDVMLCSNIFGDIISDECAMITGSMGMLPSASLNESNFGLYEPAGGSAPDIAGKNIANPVAQILSAALMLRYSLGEEEAAQSIEAAVSKALSAGELTADLAGDKPALTTSAMGDKIAEYILNS

SEQ ID NO: 29434 - protein, 580 aa, Idiomarina baltica OS145
MADKIELKVPDVGGEEVEVIEILVSAGDTIEKEDGVVTVESDKASMDIPASEGGKIVELKVKEGDTIKEGDVLAIIEAASDDSTDDDDDSDDDKAEDTTEESSSDDSSSDAPEDDDDAQDDQEQEAASGGESEVIDVEVPDIGDEEDVEIIEILVNKGDSVEKEDGLITLETDKATMDVPCPEDGEVEEMLVKVGDKVSQGSKIAKLKVTRSGGSSSSTKDESKSASKSEDKAEQAPSKSESDDKASAKSNSTPTSERQPPVPDHPTERKDGSPIHASPAVRRVAREFGVDLSQVKGTGPKSRILKEDVQEYVKYELSRPKAVAGQTSQGGGGLQVIDGPKVDFSKFGEVEEVQLSRIQRKSGPNLHRNWVTIPHVTQFDEADITELERFRKSENEVAKKQDLGFKITPLVFIMKACAKALREFPNFNSSLSESGEALIMKKYVHIGIAVDTPNGLVVPVIRDVDKKGIYELSEELVDVSARARDGKLKAADMQGGCFSISSLGGIGGTAFTPIVNAPEVAILGVSRNEMKPKWNGKEFEPKLMLPLCLSYDHRVIDGADAARFTAYLSQVLGDIRKLVL

SEQ ID NO: 29435 - protein, 410 aa, Tagetes erecta
MATHKLLQFTTNLPPSSSSISTGCSLSPFFLKSSSHSPNPRRHRRSAVCCSFASLDSAKIKVVGVGGGGNNAVNRMIGSGLQGVDFYAINTDSQALLQSVAHNPIQIGELLTRGLGTGGNPLLGEQAAEESKEAIGNALKGSDLVFITAGMGGGTGSGAAPVVAQIAKEAGYLTVGVVTYPFSFEGRKRSVQALEAIEKLQKNVDTLIVIPNDRLLDIADENTPLQDAFLLADDVLRQGVQGISDIITIPGLVNVDFADVKAVMKDSGTAMLGVGVSSSKNRAEEAAEQATLAPLIGSSIQSATGVVYNITGGKDITLQEVNRVSQVVTSLADPSANIIFGAVVDERYNGEIHVTIVATGFAQSFQKSLLADPKGAKLVDRNQEPTQPLTSARSLTTPSPAPSRSRKLFF

SEQ ID NO: 29436 - protein, 506 aa, Triticum aestivum
  misc_feature (147)..(147): Xaa can be any naturally occurring amino acid
MAAIMASITSELLFFLPFILLALLTFYTSAVAKCHGLHRWSGRTKKRRPNLPPGAVGWPFIGETFGYLRAHPATSMGQFMDQHIARYGKIYRSSLFGDRTVVSADAGLNRYILQNEGRLFECSYPRSIGGILGKWSMLVLVGDPHRXEMRSISLNFLSSVRLRAGLLPEVERQTLLVLRDWLPSSSSAVFSAQHEAKKFTFNLMAKNIMSMDPGEEETERLRLEYITFMKGVVSAPLNFPGTAYWKALKSRATILGVIERKMEERLEKMNKEASSMEEDDLLGWAMKQSNLSKEQILDLLLSLLFAGHETSSMALALAIFFLEGCPKAVEELREEHLEIARRQKLRGECKLSWEDYKEMVFTQCVINETLRLGNVVRFLHRKVIRDVHYNGYDIPSGWKILPVLAAVHLDSSLYEDPSSFNPWRWKGNASGVAQNSNFMPYGGGTRLCAGSELAKLEMAIFLHHLVLNFRWELAEPDQAFVYPFVDFPKGLPIRVHRIAQEEEGEE

SEQ ID NO: 29437 - protein, 652 aa, Blastopirellula marina DSM 3645
MGAAQQTLVVVGNGMVSHALCQRLVADRERLSYSIIVIGEEPRTAYDRVRLTKYFETPDPEVLQLATRQWYEDHGIQLRTGDAVIEIDRDRHEVTCASGDKLGYDRLVMATGSRAWRPDVPGVELDGVYLYRTLDDVDAIRNHALRAKSAAVIGGGLLGLEAAKALHDYGLEVHIIEVAPGLMPRQLDADCGAFLKEKIEQLGCQVHLIKRSTEIIADGHSRVLQFASGDSLSVDMVVISAGIRPRAELAAQAELAIGKRGGIEVDDALRTSDPQIFAIGECAEHRGMVYGLVGPGIAMATTLGDNLLGGSSRFVGADQSARLKLLDIDVTSLGSPLGDSPNITLIAAAGDDYARKILLLGGKAVGAFGVGPWSECERLRTVIDAGGRIWPWQQARFQRTGNVWGSDASVQQWPDGAIICSCKNVTKGAIDLAVASGCASVAEVAHATGASTSCGSCQPLVKQILGSSEVVTRIPGRNSLLSASILTLLGMTTLLLIGQVAAAESVDSFRYQLSLLWRNDLLKQITGYGLLAVMLASTLFTLRKRWPRMTWGEYGYWRAFHAIVGFTTLGGLWLHTGGGLGANLNLWLSLAFIALAITGGLTGAAAALESQFTGDVAIWLRKYRPWINQIHIWILVPLGVFLAFHVTCVYYF

SEQ ID NO: 29438 - protein, 710 aa, Staphylococcus capitis
MDFVPNRHNKYAIRRFTVGTASILVGATLIFGVNHEAKAAETSTELTQAQADEDCSGITDQGQQEEMLTETQNTQNDYNEQQPTQQIDNDCIIDEVPMNEVEYSDDASSKAQEEDATSLENVSTDINTRNTENESVDAQSTDNCIANEQTFDNESVQEQTDNQVNNDNNIDELQKAQEYETQEENNDANQSLSESADCENDIQAGSNNYDIEAISGVSENNNDNLDNSSDVSANGDVAENVSALDSNSDCDLYADRSLDYDTDSTSYDYNTDSDYNTDCDYGSDRSLDYDTDSTSYDYNTDSDYNTDCDYGSDRSLDYDTDSTSYDYNTDSGYDTDSEYNTDCDYNTDSDYNSDCDYSSDSDSGLDYDSDSSYDSDASYDSDSSYDSDASYDSDTDCDYNSDCDSDSSYDSDTDYDSDSDNDLDSDSDSESDCDSDSDSDSDSDSDSDSDSDSDSDSDSDSDCGSDSDCDSDSDSDSDSDSDSDSDSDSDSDCGSDSDCDSDSDSDSDSDSDSDSDSDSDSDSDSDSDSDSDSDSDSDSDSDSDSDSDSDSDSDSDSDCGSDSDCDSDSDSDSDSDSDSDSDSDSDSDSDSDSDCGSDSDCDSDSDSDSDSDSDSDSDSDSDSDSDSDSGSNCDSGSEHKVPVVPTQYHEMTSHHDSNHHYNNLVMEQHHKQELPDTGYDVANNGTLFGGILAALGSLLLVGSKRRSKKY

SEQ ID NO: 29439 - protein, 515 aa, Vibrio fischeri ES114
MSDQVIIFDTTLRDGEQALSASLTVKEKLQIAYALERLGVDVIEAGFPVSSPGDFESVKTIAQHIKNSRICGLSRAVAKDIDAAAEALKVAEAFRIHTFISTSTVHVQDKLRRSYDDVVEMGVKAVKHARKYTDDVEFSCEDAGRTPIDNLCRMVEAAIDAGANTINIPDTVGYTVPGEFGGIVQTLFNRVPNIDKAIISVHCHDDLGMSVANSIAAVQAGARQVEGTINGIGERAGNCSLEEIAMILKTRSEYLGVHTNLKHDEIHRTSKLVSQLCNMPIQSNKAIVGANAFSHSSGIHQDGMLKNKNTYEIMTPESIGLKNQALNLTSRSGRAAVKSHMDEMGYKEDEYNLDTLYADFVKLADRKGQVFDYDLEALMHFANLRDEDDFYKLNYLSVQSGSVMATTSIKLLCGDEEKCEAAVGNGPVDALYQCIYKLTGYDIVLDKFDLTAKGEGEDGLGQADIIANYKGRKYHGTGLATDIIEASGQALLHVINSIHRADQIAEIKQKKVETV

SEQ ID NO: 29440 - protein, 302 aa, Schizosaccharomyces pombe; identical to SEQ ID NO: 609

SEQ ID NO: 29441 - protein, 206 aa, Oryza sativa
MASRRRTLLKVIILGDSGVGKTSLMNQYVNKKFSNQYKATIGADFLTKEVQFEDRLFTLQIWDTAGQERFQSLGVAFYRGADCCVLVYDVNSMKSFDNLNNWREEFLIQASPSDPDNFPFVLLGNKVDVDGGNSRVVSEKKAKAWCASKGNIPYFETSAKDGTNVEEAFQCIVKNALKNEPEEELYVPDTVDVVGGNRAQRSSGCC

SEQ ID NO: 29442 - protein, 409 aa, Arabidopsis thaliana
MAAFLQTNISLNAIKIVPGKYSSLTDHQFRAPYRIRCAAASPGKKRYNIALLPGDGIGPEVISVAKNVLQKAGSLEGLEFDFKEMPVGGAALDLVGVPLREETFTAAKLSDAILLGAIGGYKWDKNEKHLRPEMALFYLRRDLKVFANLRPATVLPQLVDASTLKKEVAEGVDMMIVRELTGGIYFGEPRGITINENGEEVGVSTEIYAAHEIDRIARVAFETARKRRGKLCSVDKANVLDASILWRKRVTALASEYPDVELSHMYVDNAAMQLIRDPKQFDTIVTNNIFGDILSDEASMITGSIGMLPSASLGESGPGLFEPIHGSAPDIAGQDKANPLATILSAAMLLKYGLGEEKAAKRIEDAVVDALNKGFRTGDIYSPGNKLVGCKEMGEEVLKSVESKVPATV

SEQ ID NO: 29443 - protein, 447 aa, Borrelia garinii PBi
MYRIKNENLDFKIDSLGECKQNNPLIDFYAGEGSSHFVNEKNKIKFSVYRNEDEGDKYEDILLEKAGPREKIYFVPRHVKAAITTCGGLCPGFNDVIRSIVRTLWKIYGVRNIYGVKFGYQGLLPESNSPFINLNPDVGDDINKFGGTILGSSRGGIKPVEIVDTLERMNINMIFNIGGDGTQKGSLLIAEEIEKRNLKIAVVGIPKTVDNDFMFVQKSFGFETAVEQAVAAVAGAHFEANSAYNGIGLVKVMGRDSGFIAAHTALSSNDVNFCLIPELDFDIEGPNGFLVHLERRLLEKESLEEIPHAVILIAEGAGQKYFNQFPRKKDDSGNLLYEDIGLYIKDKITEYFKAKNIQFTLKYIDPSYIIRSSPANASDSLYCARLGSNAVHAAMSGKTKMLISLWSTKFVHIPIKMAVIDRNKVNPNGSFWRDVLSSTGQPISMKN

SEQ ID NO: 29444 - protein, 443 aa, Borrelia garinii PBi
MKIIIIGGTSAGTSAAAKAKRLNKKLDITIYEKTNIVSFGTCGLPYFIGGFFDNPNKMISRTPEEFEKTGISVKTNHEVIKVNVKNNTIVIKNQITGSIFNNTYDKLMIATGAKPIIPAINNINLKNFYTLRNLEDGQKIKNLMDKEEIKNIVIIGAGYIGIEMIEAVKNKRKNVRLIQLDKHILIDSFDEEIVKIMEEELIQKGVDLHTSEFVKSLIGGKKVEGVVTNKNTYQADVVILATGIKPATEFLENQLKTSTNGAIIVNEYGETSIKNIFSAGDCATIYNIVSKKNEYIPLATTANKLGRIVGENLAGNHVSFKGTLGSASIKILSLEAARTGLTEKDAKKLQIKYKTIFIKDKNHTNYYPGQEDLYVKLIYEENTKIILGAQAIGKNGAVIRIHALSIAIYSKLTTKELGMMDFSYSPPFSRTWDILNIAGNAAK

SEQ ID NO: 29445 - protein, 106 aa, Glycine max
MGHANASNSTTMALAPSASLKSFTSPIPYLFGGLALMLALIGLALLILACSYSKNYSLDGNEDKAKRATGMEVDSEPKIVVIMAGDSNPTYMAKPVPSTHHTEEAD

SEQ ID NO: 29446 - protein, 326 aa, Vanderwaltozyma polyspora
SIVGRPRHQGIMVGMGQKDSYVGDEAQSKRGILTLRYPIEHGIVTNWDDMEKIWHHTFYNELRVAPEEHPVLLTEAPMNPKSNREKMTQIMFETFNVPAFYVSIQAVLSLYSSGRTTGIVLDSGDGVTHVVPIYAGFSMPHGILRIDLAGRDLTDYLMKILSERGYSFSTTAEREIVRDIKEKLCYVALDFEQEMQTAAQSSSIEKSYELPDGQVITIGNERFRAPEALFHPSVLGLESSGIDQTTYNSIMKCDVDVRKELYGNIVMSGGTTMFPGIAERMQKEITALAPSSMKVKIIAPPERKYSVWIGGSILASLTTFQQMWIS

SEQ ID NO: 29447 - protein, 590 aa, Bartonella quintana
MTINLHRPDIAELKPRITVFGVGGGGGNAVNNMINAGLQGVDFVVANTDAQALAMSKAERVIQLGAAVTEGLGAGALPEVGQAAADECIDEIIDHLADSHMVFITAGMGGGTGTGAAPVVARAAREKGILTVGVVTKPFQFEGARRMKTAEAGIEELQKSVDTLIVIPNQNLFRIADEKTTFADAFAMADQVLYSGVASITDLMIKEGLINLDFADVRSVMHEMGRAMMGTGEASGEGRSLAAAEAAIANPLLDDTSMRGARGLLISITGGRDMTLFEVDEAANRIREEVDADANVIFGAIDDESLEGVIRVSVVATGIDREVNDVVQPSHPQLQRQATSIRKNDPGMSQTSFHLQSPPLRSESMVEVIEALEIEKGKSIGEQFRPKSQIFSQPVDTVAARNANSVSYGSNVVHGQISNATRPQFSRCSQQSMAASVSMEATAHILDEMIGVVKQKENQVQQKEMQQMRARSAPMRMPELKDFPPVAHGQSERSSTADQGPRNLWQRLKQSLTHREEAEPQAHLEPAVRSSQQQNVHVYNKNSQAFPQDASVYVPRRSGELHPHVPQDQRTFISEEDQLEIPAFLRRQAN

SEQ ID NO: 29448 - protein, 514 aa, Glycine max
MASIQWPYEQLKTAFSVSTFHQYLFLFLLVIVVLKLTRRPKIKPSFNLPPSPRKLPIIGNLHQLSKLPYHSLRTLSQKHGSLMLLQLGQTRALVVSSPDAVREIMKTHDITFSNRPKTTAAKTLLYGCNDIGFASYGESWKHKRKICVLELLSPKRVQSLSLIREEEVAELINKIREASLSDASSSVNLSELLIETTNNIICKCALGKKYSTEDCHSRIKELAKRAMIQLGVVTVGDRFPFLGWVDFLTGQIQEFKATFGALDALFDQVIAEHKKMQRVSDLCSTEKDFVDILIMPDSELTKDGIKSILLDMFVAGSETTASALEWAMAELMKNPMKLKKAQDEVRKFVGNKSKVEENDINQMDYMKCVIKETLRLHPPAPLLAPRETASSVKLGGYDIPAKTLVYVNAWAIQRDPEFWERPEEFIPERHDNSRVHFNGQDLQFITFGFGRRACPGMTFGLASVEYILANLLYWFNWKLPATHTSGQDIDMSETYGLVTYKKEALHLKPIPFFL

SEQ ID NO: 29449 - protein, 530 aa, Borrelia garinii PBi
MINYKNLNELENFKILEGIAPEVLKTALTGKRIKEYDITIEGDSVHYNYASKQINENHLKIFQNLSDEANLIEKYKEVLNGEKINISENRKVLHHLTRGQIGKDVIEDNKENMREFFQSELEKIYNFAKQVHSGNIKSVNGKKFKNVVQIGIGGSSLGPKALYSSIKNYAKKHNLALMNGYFISNIDPDESEEVLNSINLDETLFIIVSKSGNTLETTANMQFLINKLKSNGIKEYKKQMTIITLKNSMLALEETGCLEYFFMHDSIGGRFSPTSAVGLALLTLCFTEKIVKEIIKGANKTDKKSLNKKVKDNAPLLAALISIYERNVLNYSSNCIIAYSKAMENFYLHLQQLEMESNGKSVNRFNETINYKTVRIIWGGVGTDVQHSFFQMLHQGTDIVPMDFIGFNATQLKEDVISDNSSSNDKLKANLIAQIIAFSKGKENSNKNKNFKGERPSALIYSKELTPYAIGAILSHYENKVMFEGFLLNINSFDQEGVQLGKILANQILKNNAFEDEVIESYSKKILKQD

SEQ ID NO: 29450 - protein, 263 aa, Bacillus thuringiensis serovar konkukian str. 97-27
MESNRVVTWSKENGIATIIIDNPPMNVLGSAVVEQLTVAVDTIERDDEVIVVLLTGAGEKTFVAGGDIKSFPEWIGKGSEYAEEKSLWLQNPLNKIERLPKPVIAAINGLALGGGCELALSCDIRIIEEHAQIGLPEVKLGLFPGAGGTQRLPRLIGTASAKEMMFTGEPLTAEAAWRVGLVNHIVPRGESLNKAKELAAKMARFSLPALSLMKQSIDKGLSSSLEEGLKIEAENFGHVFQTSDVREGVEAFIEKRAPFFHHK

SEQ ID NO: 29451 - protein, 145 aa, Corynebacterium nephridii
MIIVCASCGAKNRVPEEKLAVHPNCGQCHQALLPLEPIELNEQNFSNFISNSDLPVLIDLWAEWCGPCKMMAPHFAQVAKQNPYVVFAKIDTEANPRLSAAFNVRSIPTLVLMNKTTEVARISGALRTLELQQWLDQQLQQQQGN

SEQ ID NO: 29452 - protein, 149 aa, Arabidopsis thaliana
  misc_feature (4)..(4): Xaa can be any naturally occurring amino acid
  misc_feature (16)..(16): Xaa can be any naturally occurring amino acid
  misc_feature (58)..(58): Xaa can be any naturally occurring amino acid
  misc_feature (112)..(112): Xaa can be any naturally occurring amino acid
  misc_feature (121)..(121): Xaa can be any naturally occurring amino acid
  misc_feature (124)..(124): Xaa can be any naturally occurring amino acid
NNDXTSITSNGGRVNXMQVWPPIGKKKFETLSYLPDLTDSELAKEVDYLIRNKWIPCXEFELEHGFVYREHGNSPGYYDGRYWTMWKLPLFGCTDSAQVLKEVEECKKGVPXAFIRIIGFXNTXQSPVESSFNLPYKKVTGKFFFPKRS

SEQ ID NO: 29453 - protein, 293 aa, Burkholderia sp. 383
MSILINKDTKVITQGITGKTGQFHTRACREYANGREAFVAGVNPKKAGEDFEGIPIYASVKEAKAETGATVSVIYVPPAGAAAAIWEAVEADLDLAICITEGIPVRDMIEVKDRMRREGRKTLLLGPNCPGTITPDELKIGIMPGHIHRKGRIGVVSRSGTLTYEAVAQLTALGLGQSSAVGIGGDPINGLKHIDVMKMFNDDPDTDAVVMIGEIGGPDEANAAEWIKDNMKKPVVGFIAGVTAPPGKRMGHAGALISGGADTAEAKLEIMEACGITVTRNPSEMGRLLKKAL

SEQ ID NO: 29454 - protein, 677 aa, Bacillus subtilis subsp. subtilis str. 168
MKKRLIQVMIMFTLLLTMAFSADAADSSYYDEDYRPQYHFTPEANWMNDPNGMVYYAGEYHLFYQYHPYGLQWGPMHWGHAVSKDLVTWEHLPVALYPDEKGTIFSGSAVVDKNNTSGFQTGKEKPLVAIYTQDREGHQVQSIAYSNDKGRTWTKYAGNPVIPNPGKKDFRDPKVFWYEKEKKWVMVLAAGDRILIYTSKNLKQWTYASEFGQDQGSHGGVWECPDLFELPVDGNPNQKKWVMQVSVGNGAVSGGSGMQYFVGDFDGTHFKNENPPNKVLWTDYGRDFYAAVSWSDIPSTDSRRLWLGWMSNWQYANDVPTSPWRSATSIPRELKLKAFTEGVRVVQTPVKELETIRGTSKKWKNLTISPASHNVLAGQSGDAYEINAEFKVSPGSAAEFGFKVRTGENQFTKVGYDRRNAKLFVDRSESGNDTFNPAFNTGKETAPLKPVNGKVKLRIFVDRSSVEVFGNDGKQVITDIILPDRSSKGLELYAANGGVKVKSLTIHPLKKVWGTTPFMSNMTGWTTVNGTWADTIEGKQGRSDGDSFILSSASGSDFTYESDITIKDGNGRGAGALMFRSDKDAKNGYLANVDAKHDLVKFFKFENGAASVIAEYKTPIDVNKKYHLKTEAEGDRFKIYLDDRLVIDAHDSVFSEGQFGLNVWDATAVFQNVTKES

SEQ ID NO: 29455 - protein, 258 aa, Rhodobacter sphaeroides 2.4.1
MAYETLIVEIEDYVALIRLNRPDALNALNSKMMSELADALGAADRNEKVRCIVLTGSEKAFAAGADIKEMAEQSFVDVFGSDFFTSDSEAMLRVRKPIVAAVAGYALGGGCELAMMCDFIIAADTAKFGQPEINLGVVAGLGGTQRLTRFVGKSKSMDMHLTGRFMDAAEAERCGLVSRVVPAKNLMEEAMKAASKISEKSLLTAMAVKEAVNRSYETTLREGVLFERRLFHALFATEDQKEGMAAFLEKRTPQFRDK

SEQ ID NO: 29456 - protein, 306 aa, uncultured bacterium
MEEKYDVIIVGAGAAGLAAGIYTSRARLSTLILNEGAVGGQMVLTNEIANYPGVETTSGYALAGTMKKQAKAFGCKIKSNIRIVAYDLNEKEKRIRLEDGKEFTSRSVILAPGGKPRSLHIPGEETYKGTGISYCATCDGDFFTGKEIAVVGGGNSALEEAVTLTNYASKVTIVHQFDHFQAFQHAIDEATRNPKIEFIMESELREFSGNGVLEEVAVEHLPSGNRSSLKVDGVFIFVGYMPNTKSLKGIVGLNERHEIIVDDRLQTSVPGVFAAGDCIPKRYRQVTTAVADGTVAALSVSEFLRS

SEQ ID NO: 29457 - protein, 256 aa, Elaeagnus umbellata
MAPFTKSVTEVQVESVIFPPEVKPPGSSKTLFLGGAGVRGIEIQGKFIKFTAIGVYLEDNAVPSLAVKWKGKSAQELTESVEFFRDIVTGPMEKFTRVTTILPLTGQQYSEKVSENCVAAWKSLGIYSDAEAKAIEKFIEIFKDQTFPPAASNLFTQSPLGSLTMSFSKDGSIPEVGNAVLENKLLSEAVLESIIGKHGVSPEAKQNLATRLVQLLNENSTTDLNESENEKLNSNEVSKEEKPLQVEKSAFKEVEV

SEQ ID NO: 29458 - protein, 647 aa, Brassica napus
MSSAPSPGTGSPPSPPSNSTTTTPPPASAPPPTTPSSPPPPSTIPTSPPPSSRSTPSAPPPSPPTPSTPGSPPPLPQPSPPAPTTPGSPPAPVTPPTRNPPPSVPGPPSNPSREGGSPRPPSSPSPPSPSSDGLSTGVVVGIAIGGVALLVIVTLICLLCKKKRRRDEEDAYYVPPPPPPGPKAGGPYGGQQQQWRQQNATPPSDHVVTSLPPPPKAPSPPRQPPPPPPPPFMSSSGGSDYSDRPVLPPPSPGLVLGFSKSTFTYEELARATNGFSEANLLGQGGFGYVHKGVLPSGKEVAVKQLKVGSGQGEREFQAEVEIISRVHHRHLVSLVGYCIAGAKRLLVYEFVPNNNLELHLHGEGRPTMEWSTRLKIALGSAKGLSYLHEDCNPKIIHRDIKASNILIDFKFEAKVADFGLAKIASDTNTHVSTRVMGTFGYLAPEYAASGKLTEKSDVFSFGVVLLELITGRRPVDANNVYVDDSLVDWARPLLNRASEQGDFEGLADAKMNNGYDREEMARMVACAAACVRHSARRRPRMSQIVRALEGNVSLSDLNEGMRPGQSNVYSSYGGSTDYDSSQYNEDMKKFRKMALGTQEYNATGEYSNPTSDYGLYPSGSSSEGQTTREMEMGKIKRTGQGYSGPSL

SEQ ID NO: 29459 - protein, 321 aa, Ralstonia eutropha JMP134
MAKHAKVLILGSGPAGYTAAVYAARANLEPVLITGLAQGGQLMTTTDVENWPGDAKGVQGPELMQRLLAHAEEFKTEIIFDHIHTAKLVDESGNPARPFRLIGDAGEYTCDALIIATGASAQYLGLPSEESFMGRGVSACATCDGFFYKNQEVAVVGGGNTAVEEALYLSHIASKVTVIHRRDSFRAEPILVDRLLQREKEGRVEIRYDSVLDEVLGDDSGVTGLRIRGAKSGETQDLKLAGVFIAIGHKPNTDLFVGQLAMENGYLVTKSGLSGDATATSVPGVFAAGDVQDHVYRQAITSAGTGCMAALDAQRYIEALK

SEQ ID NO: 29460 - protein, 408 aa, Sinorhizobium meliloti
MSRIVIVGAGECGARAAFALREKGFDGGITLIGAEPDLPYERPPLSKEGLAAAAPPKYLADAMRYQEARITVLTNAPVARIDRDEKAVELADGRSVAYDRLLLATGAPPRVFPGAPENSERIRMLRTHADALAIRAALAPGRKLAVIGGGFIGLELAATARKLGAEVGVIEGLPRILSRGVPKEIAAIVDERHRREGVKILCGARIATIGHQGDGANILLADGGSIAADLLVVGIGATPNTELAEAAGLAVEDGIPVDETLRTSDPDIFAAGDCCSFPLSHYHGRRVRLEAWRNAQEQGTLVAANLMGAAKLVASVPWFWSDQYELTLQIAGLADDAAVTVRRDLSDDASFLFHLDGEGRLIAASAIGPGNAVARDIRLAEMLIATGSRPDPAALASPETKLKKLLGV

SEQ ID NO: 29461 - protein, 503 aa, Burkholderia xenovorans LB400
MSATAAIATVKLLINGEFVESKTTEWRDIVNPATQQVLARVPFATTDEVNEAIRSAHAAFKTWKDTPIGARMRIMLKYQALIREHMPRIAKTLSAEQGKTIPDAEGDIFRGLEVVEHACSIGTLQQGEFAENVAGGVDTYTLRQPIGVCAGITPFNFPAMIPLWMFPMAIVCGNTFVLKPSEQDPLSTMQLVELALEAGVPKGVLNVVHGGKEVVDALCTHELVKAISFVGSTAVGTHVYRLGSEHGKRVQSMMGAKNHAVVLPDANREQTLNALAGAGFGAAGQRCMATSVVVLVGAAQQWLPELVAKAKTLKVNAGNEPNTDIGPVVSRAAKQRILGLIETGVKEGATLALDGRDVKVPGYEQGNFIGPTLFTDVTTEMEIYRQEIFGPVLVVLSVATLDDAIELVNRNPFGNGVGLFTQSGAAARKFQSEIDIGQVGINIPIPVPVPFFSFTGSRGSKLGDLGPYGKQVVQFYTQTKTVTARWFDDDTVNDGVNTTISLR

SEQ ID NO: 29462 - protein, 330 aa, Antirrhinum majus
MSLSCSDCFSDLLCGEDSNIIFSGGGDDLPEYTSDVESIPTDVDESIAGLLEDERDLAGVNSSSSNQSVDSSTRTESTAWILKVQRYYGFQPLTAYLAVSYFDRFLNAHHLPKLNGWPMQLLSVACLSLAAKMEESLVPSLLDLQVEGANFIFEPRNIQRMELLVLRVLDWRLRSISPFCYLSFFALKIDPTGTYTGFLTSRAKEIILSTVQETSLIEYRPSCIAAATMLSSANDLPKFSFITAQHAEAWCDGLHKDNIASCIKLIQGVESNNRPKKQPKVLPQLRVMTRASLASSESSSSTSSSPSYKRRKLNNSSRADDDKESSDYGV

SEQ ID NO: 29463 - protein, 694 aa, Desulfotalea psychrophila LSv54
  misc_feature (134)..(134): Xaa can be any naturally occurring amino acid
MQKTLTTCPYCGSGCTFFLEVENNTITGVSPNRVRAVNNGSLCSKGHFGTDFVHSKDRLTKPLIRKKGVLTPVSWQEAYSYTAQRLLQISEEHGAQAIAGFSSARCTNEENYLFQKMMRAALGTNSVDHCARLXHAPTVAGLTTTLGSGAMTNSIAELDTMGAGDTIFAIGTNTTECHPIIGLGMLRAVKRGARLIVADPRATTLTQHAEVWLRLQPGSDVALLNALGHLILRDGLEDRVYIDAHTENFSAYRSFVEKISLAEAESITAVALADMEKAARILGESANVATYYTMGITQHTSGVDNVMAVSNVAILTGNIGRAKTGVNPLRGQNNVQGACDMGALPDVFPGYQKVSRPEIVEKFSRAWGVELSARPGITIPSVLSGIERDEVKALYVFGENPLRSDPDINHVKHCLEQVEFLVVQDIFLTETAALADVVFPGTTFAEKDGTFSSTERRVQRVRRAVDPIGESRPDWQIISELMVALGYPSSYTHPREIFAEMRSLTPTYAGITYERLENESLQWPCPHENHPGTPVLHVGGAIRGLARFEPAQHRQPAEVPDTDYPLKLTTGRVVAHYHTGTMTRRCWGLNGVAPHELVEIHPHDALCLGIIDGDLVRVASRRGAVEARAQVTTRVIQGLVFMTFHYTESSGNMLTNSAADPITQTPELKICAVSVQKVERKAVSPHNRRKRQMV

SEQ ID NO: 29464 - protein, 109 aa, Brassica napus
MAARAVTMLVVAAVLAGGASAQSTSGCTQTLIGMSPCLNYITGNETAPSKSCCSQLATVVSSKPECLCVALNADPAALGLGAVNKTRALGLPDQCGVKTPPLSNCASAP

SEQ ID NO: 29465 - protein, 257 aa, Pseudomonas fluorescens Pf-5
MSYETILLDIKGRVGLITLNRPQALNALNAQIVGEVNQALDRLEADPQIGCIVITGSKKAFAAGADIKEMAELSYPQIYLDDLFSDSDRVANRRKPIIAAVNGFALGGGCELALMCDFILAGDNAKFGQPEINLGVLPGMGGTQRLTRAVGKAKAMEMCLTGRFIDAVEAERCGIVARIVPADELVEEALKVAAVIAGKSIPVSMMIKESVNRAFEVSLSEGVRFERRVFHAAFATQDQKEGMAAFIAKRDPQFKDQ

SEQ ID NO: 29466 - protein, 551 aa, Anabaena variabilis ATCC 29413
MFDSIDAALSDLKAGRAIVVVDDENRENEGDLICAAQFATPDMINFMAVEARGLICLAMTGDRLDELDLPLMVTNITDPNQTAFTVSVDASPHLGVSTGISAEDRARTIQITLNPATKPSDLRRPGHIFPLRAKAGGVLKRAGHTEAAVDLSRLAGLYPAGVICEIQNPDGSMARLQQLIEYAKHHDLKIISIADLISYRLQHDRLVYREVITKLPSQFGQFDIYAYRHTLDNTEHVAIVKGNPENFRDEPVMVRMHSECLTGDALGSLRCDCRMQLQAALKMIETAGQGVVVYLRQEGRGIGLINKLKAYSLQDMGLDTVEANERLGFPADLRDYGMGAQMLMDLGVKKIRLITNNPRKIAGVKGYGLEVVDRVPLLIEANDYNSYYLATKAKKLGHMLLQTYLVTVAIHWQDDPQLVTKRYERLEKLRHLVRSYDLLLQEEARPLAIALFDKPSLIVHLGFDQEKVASCDWYSQSGHPYLQAILPILDNLATLPYVQKLEFLISSGSDPLSNLQVQLDRQTISPDKLPSSVGSDLETQKIYSFSKEVEE

SEQ ID NO: 29467 - protein, 877 aa, Phaeosphaeria nodorum
MSAAIDNEDLEELSISMPHPRRGGPSTTKAVDFTTPPVAPPTVMQASKSRDSKASQRLGQYTIVKTLGEGSFGKVKLATHQVSGQKVALKIINRKRLVTRDMAGRIEREIQYLQLLRHPHIIKLYTVITTPTEIIMVLEYAGGELFDYIVNNGRLQEDKARKFFQQIVCAVEYCHRHKIVHRDLKPENLLLDDQYNVKIADFGLSNIMTDGNFLKTSCGSPNYAAPEVISGKLYAGPEVDVWSCGVILYVLLVGRLPFDDEYIPTLFKKIAAGNYSIPSYLSPGAVSLIKKMLMVNPVHRITIGEIRMDPWFTKDIAPYLEPPVQEFFDSGVDPHKAIDPTAIAPAIPAPVVQKLHDTVVTKLGKTMGYAEHDVQEALARDEPSAIKDAYLIVRENQMMKVNPLMTQESQLAPFLAQSPPTHHESYLGSSIPQILNSSSPPKGIPSQAQDQHERARHGSNASSQLASVRSPVSTVAILPSSLTEYHKAYMKGHPRPPFKPEHDGLPPTPDQTEEQRQISARRLKPNFRALPDTTRNRPEPMTSLPAKKPRPTKWQFGIRSRNQPAEAMLAIFKALKAMGADWEVPKIRKAGGKGGSRSPTGSHASQERSRSRSRSRSRSPGSSVSSHDSGDEKKTGSDSPTHEPLTVRNADSGEQRGRQRKHYNHTNDWGYHIPEDPWVINARFRKDGMFPPGVAHPSSTHSSRVDLANDPSGLRRRSSTNTSTTSLSHHIDSMTITDRPNSISGEDHPEADEAVYIYVSIQLYSIDREFFVVDFKCAGYERLVSNLVREVKAASSSSPQHQHEDGWDDEAGVWRRLDEGEPLPDDLAKELRDGGKGVLRERTEEVGAGRKEGEKVVTSPFPFLDVASTLILQLSGE

SEQ ID NO: 29468 - protein, 421 aa, Ehrlichia ruminantium str. Gardel
MLPNITQLSNSFTIITDTMPYVESVSINIWVNVGSRHENTNIAGISHFLEHMAFKGTKTRTALDIAQIFDNIGGNFNAHTDREHTVYHVKILKRDIKIAIEVLADIILNSQFPQEEIDREKGVVLQEIYQTNDSPTSIIFDKYIEAAYPNQVFGKSILGTPESVSNLSKENLHTYMQEHYHAGNMLLSVAGNITHNEVIDLATQYFSQIKKSTPQETNKSVYISGEYREERDLEQVHIVIGFPSSSYKDDQFYVIQILDSILGNGMSSRLFQKIREQLGLVYSISSFNSSYSDNGIFSIYTATDKNNLPQLLDAIAAEVQSIYINLEENEVIRAKDKLTSEILMSRESTTARAESLGYYYSHYNRYITKEELLKKISEITMEDILNCISRLLRSNNKITLAAIGQIETLPSYKDICQMFHI

SEQ ID NO: 29469 - protein, 514 aa, Solanum tuberosum
MDGTAVQGTSSVDSFLRNYKLGKTLGIGSFGKVKIAEHTLIGHKVAVKILNRRKIRNMDMEEKVSREIKILRLFMHGHISRLYEVIETPSDIYVVMEYVKSGELFDYIVEKGRLQEDEARNFFQQIISGVEYCHINMVVHRDLKPENLLLDSKWNVKIADFGLSNIMRDGHFLKTSCGSPNYAAPEVISGKLYAGPEVDVWSCGVILYALLCGTLPFDDENIPNLFKKIKGGYITLPSHLSAGARDLIPRMLIVDPMKRMTIPEIRLHPWFQAHLPRYLAVPPPDTMQQAKKIDEEILQEVVKMGFDRNNLTESLRNRVQNEGTVPYYLLLDNRHRVSTGYLGAEFQESMEYGYNRINSNETAASPVGQRFPGIMDYQQAGARQFPIERKWALGLQSRAHPREIMTEVLKALQELNVCWKKIGQYNMKCRWVPSVPGHHEGMGVNSMHGNQFFGDDSSIIENDGDTKLTNVVKFEVQLYKTREEKYLLDLQRIQGPQFLFLDLCAAFLAQLRVL

SEQ ID NO: 29470 - protein, 508 aa, Caulobacter crescentus CB15
MAISLSAPRTTELKPRIVVFGVGGAGGNAVNNMIEAGLEGVEFVVANTDAQQLQFAKTDRRIQLGVQITQGLGAGAHPEVGMSAAEESFPEIGEHLDGAHMVFITAGMGGGTGTGAAPIIAKCARERGILTVGVVTKPFHFEGRHRMRLADSGIQELQRYVDTLIVIPNQNLFRVANERTTFAEAFGMADQVLHSGVRSITDLMVLPGLINLDFADVRTVMTEMGKAMMGTGEGTAEDRALMAAQNAIANPLLDEVSLKGAKAVLVNVTGGMDMTLLEVDEAANAISDQVDPEANIIFGAAFDPSLEGVIRVSVVATGMDGASIAQIEPKPVSRNISAAPLIAETSRPAPQPEPARPTARYEAARPAERPVAFAPEPAPEPEIVMSAPQPEPEAELYYDEPTVAEEPRVSAAPARSVNRIVDPLVDDVAEEPLFPENNYYEERRPQKQGGFFSMFGGGRQRYEQQASAPQAQARSAQSARPQLQPIETPQADDAEDLEIPSFLRRLAN

SEQ ID NO: 29471 - protein, 528 aa, Oryza sativa
  misc_feature (368)..(368): Xaa can be any naturally occurring amino acid
MACVLRLASRSRSRSGLRPTLAAPRPSPVPPPPPRVGPTPAAPSPAPLRGLLLPLSPLRLASPDAFSSSSPSPAWLLDGLNWRRAGVGRRWFATEASAASTAAELVDVPLAQTGEGIAECELLRWFVTEGDQVDEFQRLCEVQSDKATIEITSRFKGKVHQIHFGPGDIVKVGETLLKMMVGDSQTVSHDSIASSTDHSHAVDAANPSGEGSVPSGTLSTPAVRHLAKQYGLNISDIQGTGKDGRVLKEDVLSYAASKGLCKEPTSALEENIDQVELLEGRGSLPDANSYEDRRISLRGYQRSMVKSMTLAAKVPHFHYLEEINCDALVELKASFQNANKDHTIKHTFLPFLIKSLSKALSKYKASFXPLLNSCFVEETNEVIFKGSHNIGVAMATEHGLVVPNIKNVQSLSILEITKELSRLHEMASHNRLSTEDIAGGTITLSNIGAIGGKFGSPLLNLPEVAIIALGRIQKLPRFDDDENVYPSSIINVTVGADHRVVDGATVARFCNEWKSLVEKPERLLLHMR

SEQ ID NO: 29472 - protein, 316 aa, Caulobacter crescentus CB15
MIKVRVASRARAAEGIAQLDLVCAEGRDLPAFEAGAHIDLFLGNGLTRQYSLCSDPAERSFYRIAVLRELTSRGGSAYVHEALTEGATLEISPPRNLFALDETAEEHLLFAGGVGVTPILAMAKRLSALGRAFTFHYCARDRSRAAFLNELSTAPFTSAVRLSFDAEPDTRLDLDVALARPKPGRRLYVCGPGGFMTHVIDGALARGWSGDQIRKEHFAAAPLSAGQDQPFELVIASSGQIVTVAADQTAAQALEAAGVFVPVSCEQGVCGTCLTRVIDGQPDHRDAFQTDEERAANDQFTPCCSRARSPRLVLDL

SEQ ID NO: 29473 - protein, 550 aa, Vibrio fischeri ES114
MLKNINPTETQAWADLTAHFETAQDFNLSDLFAADAQRFDKFSATFGQDILVDFSKNLITEETMKKLFALAEQTELSSAITAMFSGEKINKTEGRSVLHTALRNRSNTPVMVDGEDVMPAVNAVLEKMKGFTERLISGEWKGYTGKEITDIVNIGIGGSDLGPYMVSEALAPYKTRLNMHFVSNVDGTHIVETLKPLNPETTLFLIASKTFTTQETMTNAHSARDWFLAEAGDQAHVAKHFAALSTNAQSVSEFGIDTDNMFEFWDWVGGRYSLWSAIGLSIALAVGFDNFIELLEGAHEVDKHFAETDLENNVPVILALIGLWYNNFHGAESESILPYDQYLHRFAAYFQQGNMESNGKCVDRNGNPVDYQTGPIIWGEPGTNGQHAFYQLIHQGTKLIPCDFIAPAISHNQVGDHHQKLMSNFFAQTEALAFGKTEETVKAEFAAAGKTEAEVAELVPFKVFEGNRPTNSILVKQVTPKTLGNLIAMYEHKIFVQGVIWNIFSFDQWGVELGKQLANQILPELADDKAVTSHDSSTNGLINAFKAFQA

SEQ ID NO: 29474 - protein, 442 aa, Chlorobium tepidum TLS
MHPNPSAIVRKNIVSPSIGNATHPAERLSTGIVESGTLPNGLRIVSNQVPWIHSVTLGLWINAGSREDPEGFEGMAHFIEHALFKGTQKRDYVEIARCVEETGGYIDAWTTKEQTCLCVRCLREHLHLAFDLLADLCCNPVFPPDEIEKEKEVVLEEIASVNDTPEELIFEDFDRRAFSRHPLGTAILGTEESVERLTGKEIRDFMRRHYVPSKMLVTAIGNIEHDAVTGLAESFWGHLKDSPQEDSVRRLFDLSAYRPFTKTLKKSVFQSQILLGTIFPRDDRRFWGLMVLNAMLSSGMSSILNLELREKRGLVYQAYSSVSFYDEVTEFNVYAGTDKGKTSKTLDTIAELLTGNVLKEPDPFELAAAKSKMLGSMILGMEKMTRRMSHIAQDMFYFGRYLSPSEKAGMIDGVTAEDVAVAAAALGIPEQISTLVYKPGGR

SEQ ID NO: 29475 - protein, 466 aa, Corynebacterium efficiens YS-314
MKFHCKFTCPRCRDGNVEFMTVDEQVSNYYDMLLKRNAGEPEFHQAVAEVLESLKIVLEKDPHYADYGLIQRLCEPERQLIFRVPWVDDNGQVHVNRGFRVQFNSALGPYKGGLRFHPSVNLGIVKFLGFEQIFKNSLTGLPIGGGKGGSDFDPKGKSELEIMRFCQSFMTELHRHIGEYRDVPAGDIGVGGREIGYLFGHYRRLANQHESGVLTGKGLTWGGSLVRTEATGFGTVYFVQEMIKAEGETLEGKKVIVSGSGNVATYAIQKVQELGAVVVGFSDSSGWVSTPNGVDVAKLREIKEVRRARVSSYADEVEGAEYHTDGSIWDLTADIALPCATQNELDGDNARTLADNGCRFVAEGANMPSTPEAIDVFRERGVLFGPGKAANAGGVATSALEMQQNASRDSWSFEYTDERLHRIMKNIFKSCADTAKEYGHEKNYVVGANIAGFKKVADAMLAQGVI

SEQ ID NO: 29476 - protein, 105 aa, Alicyclobacillus acidocaldarius
ATMTLTDANFQQAIQGDKPVLVDFWAAWCGPCRMMAPVLEEFAEAHADKVTVAKLNVDENPETTSQFGIMSIPTLILFKGGRPVKQLIGYQPKEQLEAQLADVLQ

SEQ ID NO: 29477 - protein, 402 aa, Legionella pneumophila str. Lens
MKHSLATIEEAVATLKAGKMIILMDDEDRENEGDLVIAAEHATPEAINFMSRLGCGLICLPMAEELIDKLELPMMARHNKSPYGTAFTVSIEAANGVSTGISARDRARTIQVAIDPKSGPSDIISPGHVFPLRARKRGVLERPGQTEGSVDLVKLAGLTPAAVICEIINEDGTMSRRDELALFSKKHQIPLVTIKDLIQYRVRHENLIHPVATTQIPLEENGVFTMTVFENQIDSCEHFVLVKPPLYGNQVPLVRIHSECITGDVFGSRKCDCGKQLELSLSQIGAEGGILIYLRQEGRGIGLANKLKAYALQEQGFDTVDANLELGLPADDRDYAVAYQILKYLGVEALRLLTNNPLKIASLERYGMKITQRIPLEIEPSRENHSYLKTKKIKLGHLLAID

SEQ ID NO: 29478 - protein, 553 aa, Sulfolobus solfataricus P2
MALKMKYDFLLLSLKLLNLPIIFHLCSVSKKSVEVLDTTLRDGSQGANISFTLNDKIKIALLLDELGVDYIEGGWPGSNPKDEEFFREIKKYRLSKAKIAAFGSTKRKDVSVKEDISLNSIVKADVDVAVIFGKSWSLHATEVLKVTKQDNLDIVYDSINYLKSHGLKVIFDAEHFYQGFKEDPEYALEVVKTAESAGADVIALADTNGGTPPFEVYEITKKVREVLQVKLGIHAHNDIGCAVANSLMAIKAGARHVQGTINGIGERTGNADLIQIIPTLILKMGLNALNGQESLRKLREVSRIVYEILGLPPNPYQPYVGDNAFAHKAGVHVDAVMKVPRAYEHVDPSLVGNDRKFVISELSGTANLVSYLQGLGIAVDKKDERLKKALNKIKELEARGYSFDVGPASAILITLKELNIYKNYINLEYWKVINENNGLSIGIVKVNSQLEVAEGVGPVNAIDRALRMALQRVYPEIGEVKLIDYRVILPSEIKNTESVVRVTIEFTDNKMNWRTEGVSKSVVEASVMALVDGLDYYLQLKKTLKTAVDNYIV

SEQ ID NO: 29479 - protein, 462 aa, Exiguobacterium sibiricum 255-15
MSLLRKKDVSVMMDQKSHSKLARHLSGFDLVLLGIGAIIGTGIFVLTGTGALYAGPALPVAFIISAIVCALAALCYAEFSSMIPVSGSVYTYTYATIGELVAWIIGWCLILEYGLASSAVATGWSGYFQSLLSGFGISLPTALTAAPGAVPGSETFFNLPAFLILMVITLLLSMGIKETKRVNNIMVLVKVAVVVLFIVVGIWYVEPGNYTPFAPFGISGVLQASAIAFFAYLGFDAVTSAAEEVKDPGRNLPIGILGSLAIVTVLYVVVSAIMVGIVPFKQFEGVDSPVSLALKVAGQDWVAGFVDLGAIVGMTTVILVMTFGLVRLLFAMSRDGLLPKIFSDVNEKSHTPVKATWILGTTAGLIAGFVPLGTLAELINIGTLAAFALISIAVVILRKTRPDLKRAFKVPWVPFLPILSVLACIMLMLNLQTFTWIAFFIWTAIGLLVYFGYGRSRSKLQQ

SEQ ID NO: 29480 - protein, 469 aa, Brassica napus
  misc_feature (256)..(256): Xaa can be any naturally occurring amino acid
MQALQSSSLRASPPNPLRTPSNRQSHQITNARPTTRRSFISASASVSAPKRETDPKKRVVITGMGLVSVFGNDVDAYYEKLLSGESGISLIDRFDASKFPTRFGGQIRGFSSEGYIDGKNERRLDDCLKYCIVAGKKALESANLGGDKLNTIDKQKAGVLVGTGMGGLTVFSDGVQALVEKGHRRISPFFIPYAITNMGSALLAIDLGLMGPNYSISTACATSNYCFYAAANHIRRGEADMMVAGGTEAAIIPIGXGGFVACRALSQRNDDPQTASRPWDKQRDGFVMGEGAGVLVMESLEHAMKRGAPIVAEYLGGAVNCDAHHMTDPRADGLGVSSCIESCLEDAGVSPEEVNYINAHATSTLAGDLAEINAIKKVFKSTSGIKINATKSMIGHCLGAAGGLEAIATVKAINTGWLHPSINQFNPEPAVDFDTVANEKKQHEVNVAISNSFGFGGHNSVVAFSAFKP

SEQ ID NO: 29481 - protein, 326 aa, Issatchenkia orientalis
SIVGRPRHQGIMVGMGQKDSYVGDEAQSKRGILTLRYPIEHGIVTNWDDMEKIWHHTFYNELRVAPEEHPVLLTEAPMNPKSNREKMTQIMFETFNVPAFYVSIQAVLSLYSSGRTTGIVLDSGDGVTHVVPIYAGFSLPHAILRIDLAGRDLTDYLMKILSERGYTFSTTAEREIVRDIKEKLCYVALDYDQELQTASQSSAIEKSYELPDGQVITIGNERFRAPEALFHPSALGLEAAGIDQTTYNSIMKCDVDVRKELYGNIVMSGGTTMFPGIAERMQKEITALAPSSMKVKIIAPPERKYSVWIGGSILASLSTFQQMWIS

SEQ ID NO: 29482 - protein, 308 aa, Clostridium pasteurianum
MKEEKQLDLVIIGAGPAGLTAAIYAIRAKLNTLVLENELVGGQIRETYTVENFPGFNVISGADLADKMEEHAASIGVNIDQFSNIEKIKLSDDEKIIETEDVIYKVKALIIATGAKSRRLPIPEEEKLHGKVIHYCELCDGALYQGKDLVVVGGGNSAVEAAIFLTKYARNITIVHQFDYLQAQKYSQDELFKHKNVKIIWDSEIRNIVGENEIEKIVVENVKTKQKTELKADGVFVYIGYEPKTELFKDSININKWGYIETDENMETNIKGVFAAGDVRSKLIRQLTTAVSDGTVAALMAEKYIGGK

SEQ ID NO: 29483 - protein, 367 aa, Shewanella oneidensis MR-1
MALHSIEEIIEDIRQGKMVILMDDEDRENEGDLILAAEMVTPEAINFMAKYGRGLICQTMTKARCQQLNLPLMVTNNNAQFSTNFTVSIEAAEGVTTGISAHDRAVTVKAAVAKDAKASDLVQPGHIFPLMAQDGGVLTRAGHTEAGCDLARLAGLEPSGVIVEILNEDGTMARRPDLEIFSEKHGIKIGTIAALIEYRNTKETTVVREAKCKLPTRFGEFDMVTFRDTIDNQLHFALVKGEVKPDCLVRVHLQNTFNDLLHSERDQQRSWPLEKAMARISAEGGVLVLLGNQEHSSEILAKVKAFEAEDQGQTPVSAKWQGTSRRVGVGSQILASLGVTKMRLLSSPKRYHSLSGFGLEVTECVAE

SEQ ID NO: 29484 - protein, 107 aa, Porphyra purpurea
MSVSQVTDASFKQEVINNDLPVLVDFWAPWCGPCRMVSPVVDAIAEEYESSIKVVKINTDDNPTIAAEYGIRSIPTLMIFKSGERVDTVIGAVPKSTLESTLNKYIS

SEQ ID NO: 29485 - protein, 199 aa, Wolbachia endosymbiont of Liposthenes glechomae
LIVIPNQNLFRIANEKTTFADAFQLADNVLHIGIRGVTDLMIMPGLINLDFADIETVMSEMGKAMIGTGEAEGEDRAISAAEAAISNPLLDNVSMKGAQGILINITGGGDMTLFEVDAAANRVREEVDENANIIFGATFDQAMEGRVRVSVLATGIDSYNDKPEASSINQNKIPAEEKNFKWPYNQIPISETKEYASTE

SEQ ID NO: 29486 - protein, 941 aa, Mycobacterium avium subsp. paratuberculosis
MPDHTTFAARHIGPDPQAVAAMLDVIGVGSLDELAAKAVPAGIRDRLSADGIAPGLDRLPPPASETEALAELRGLAEANTVAVSMIGQGYYDTLTPPVLLRNILENPAWYTAYTPYQPEISQGRLEALLNFQTMVADLTGLEIANASMLDEGTAAAEAMTLMRRASRGKSNRLAVDADVFAQTAAIVATRARPLGIEIVTADLRDGLPDGDFFGVIAQLPGASGAITDWAALVAQAHERGALVALGADLLALTLITPPGEIGADVAFGTTQRFGVPMGFGGPHAGYLAVHANHARQLPGRLVGVSLDADGSPAYRLALQTREQHIRRDKATSNICTAQVLLAVMAAMYASYHGAEGLTAIARRVHGHAEAIAAALGTAVVHDRYFDTVLARVPGRADEVIAAAKARGINLWRVDDDHVSVACDEATTDEHVAAVLEAFGVAPAEPVASEIATRTAEFLTHPAFTQYRTETAMMRYLRTLADKDIALDRSMIPLGSCTMKLNAAAEMEPITWPEFARQHPFAPASDTPGLRRLIGDLENWLVAITGYDAVSLQPNAGSQGEYAGLLAIHDYHASRGEPHRDICLIPSSAHGTNAASAALAGMRVVVVGCHDNGDVDLDDLRAKVTEHRDRLSTLMITYPSTHGVYEHDIAEICAAVHDAGGQVYVDGANLNALVGLARPGKFGGDVSHLNLHKTFCIPHGGGGPGVGPVAVRSHLAPFLPGHPHAPELPQGHPVSSAPYGSASILPISWAYIRMMGADGLRAASLTAITSANYIARRLDEYFPVLYTGENGMVAHECILDLRPITKATGVTVDDVAKRLADYGFHAPTMSFPVAGTLMVEPTESETLTEVDAFCDAMIAIRGEIDRVGAGEWPVEDNPLRGAPHTAECLVTTDWDHPYSREQAAYPLGKDFRPKVWPPVRRIDGAYGDRNLVCSCPPVEAFA

SEQ ID NO: 29487 - protein, 759 aa, Bordetella bronchiseptica RB50
MAFPGLKYASSGLLAALRLGRRTGKKGRTPPSPSPGAQEAVDAAASPVASLAPLTEIISTYLDPKEVERVREAYRFADQAHLGQFRASGAPYISHPIAVTEICAGWKLDANALSAALLHDVMEDQGVGKHELAEKFSPEVAELVDGLSKLDRLDFATKAEQQAESFRKMLLAMARDVRVILIKLADRLHNMRTLDAVNPEKRRRIARETLEIYAPIAHRLGLNLLFRELQDLCFAAMYPNRYQVLYRAVLAARGNRREVISKIEDAVRAALPAAGIEAEVTGREKTLYGVYRKMTEQKKSFSEVLDIYGFRVIVHTLPECYLALGTLHQLYRPVPGKFKDYIAIPKVNGYQSLHTTLVGPYGTPVEFQFRTRDMHHIAEEGVASHWLYKDADLTLNELQKRTHQWLQSLLDIQSQTGDSGEFLEHVKVDLFPDAVYVFTPRGKIISLPRGATPVDFAYAIHTDIGNQAVAAKVNGEFVPLRTELSSGDTVEIITSPASRPNAQWLNYVRTGRARSEIRHYLRTVKYEESVAFGERLLEQAMIELHLPVPSTDDPQWDKLARSSGASSRDEILADIGLGKRLAAVVARRFAPEHDLIATTAAAVDQITSARAAPILIQGSEGQAVQLAPCCGPLPGDPIIAGMRLGHGLVVHTSDCPVALRARAREPERWINVAWDAQTAKHLPTRLDIVTRNERGVLGRLAAEVTAADANIVHVTMHDDAVSTVSLHLTVQVDSRKHLAQVIRAIRHVPQVQKIVRVKG

SEQ ID NO: 29488 - protein, 184 aa, Oryza sativa (japonica cultivar-group)
MRPVAELASAPASYAHAANGTAAHSPWQSPVPYLFGGLAAMLGLIAFALLILACSYWKLSGYLDGGSGNGQASGSAAAGEGAEGEKGSAAGAARPALGFREHVVVIMAGDERPTFLAMPATSRPAVELGAAPVASSCGCSHSEEEKKVEEVSSPPPPSERDADDDAASRRHESSSNTRQQESSQ

SEQ ID NO: 29489 - protein, 747 aa, Bacteroides thetaiotaomicron VPI-5482
MDNITPKEIADEEMINQAFQELLNDYLHTKHRKRVEIITKAFNFANQAHKGIKRRSGEPYIMHPIAVAQIVCNEIGLGSTSICAALLHDVVEDTDYTVEDIENIFGPKIAQIVDGLTKISGGIFGDRASAQAENFKKLLLTMSNDIRVILIKIADRLHNMRTLGSMLPNKQYKIAGETLYIYAPLANRLGLYKIKTELENLSFKYEHPEEYAEIEEKLNATAAERDKVFNDFTAPIRTQLDKMGLKYRILARVKSIYSIWNKMQTKHVPFEEIYDLLAVRIIFEPRNVEEELNDCFDIYVSISKIYKPHPDRLRDWVSHPKANGYQALHVTLMGNNGQWIEVQIRSERMNDVAEQGFAAHWKYKEGGGSEDEGELEKWLKTIKEILDDPQPDAIDFLDTIKLNLFASEIFVFTPKGELKTMPQNSTALDFAFSLHTDIGSHCIGAKVNHKLVPLSHKLQSGDQVEILTSKSQRVQPQWEVFATTARARAKIAAILRKERKANQKIGEELLNEFLKKEEIRPEEAVIEKLRKFHNFKNEEELLAAIGSKAITLGEADKNELREKQTSNWKKYLTFSFGNSNKEKPEEKEPQEKEKINPKEILKLTEESLQKKYIMAECCHPIPGDDVLGYVDENDRIIIHKRQCPVAAKLKSSYGNRILATEWDTHKELSFLVYIYLRGIDSMGLLNEVTQVISRQLNVNIRKLAIETNDGIFEGKIQLWVHDVEDVKTICNNLKKIQNIKQVNRVEE

SEQ ID NO: 29490 - protein, 476 aa, Brucella suis 1330
MYPNLTLIVGGEERNKGSAGTLCLTDPADGRELTIAPRAGRAEALQAAAAEKGFAEWSALSALERSKIMRRAADIMRERADAAARIMSMEQGKPLAEARGEWLGSADLLDWFAEEGRRVYGRIVPSRAPNIQIQVLKHPIGPVAAFTPWNFPAWNTMQKVAPALGAGCSVVIKPASDTPGTAWLIGKCLLEAGLPPKAVSVIWGTTSELSDALIKAPEFRKVSLTGSTRVGRIVAAQAGEYLKKVTMELGGHGPVIVAADADLDHLIPLAVQWKFRNCGQVCVSPTRFIVEASIHDEFIRRFSEKARELKVGKGVEEGTQMGPLTSQNQLETVLSMVEDALTKGAKIETGGNRIGDTGNFYEPTILSGMTAEMLAMNEEPFGPLALVMRVHSLDEAIAESNRLPVGLGAYLFTSSMTTAHRVQNHLQAGMLGVNHFALALPETPFGGVRDSGFGSEGGLEGIEAYLTTMTVTTMMV

SEQ ID NO: 29491 - protein, 487 aa, Caulobacter crescentus CB15
MSEPLLSADAWTDRLFSDGWVKPSGGVIAVQEPATETVLTQVGRADRSDVARAAASAKAAQPAWAALTADARQAILLRAADLLVEHAPDLAPWIMRESGSVAAKAAVELEHAAGFVRQAGAMATEAAGLVLPSSPGKTSIARRVPLGVVAVISPFNFPLVLSIRAVAPALATGNAVVLKPDPRTPISGGFLIARVFEAAGLPAGLLHVLPGDAEAGDALCRDPNIAMVAFTGSTGAGRKVGEVAGAHLKKVALELGGKNPLIILDDADPDVAASNAAWGAWLHQGQVCMTAGRLLVQRGIHDAVVERLAAKAGHLPVGDPMRGDVALGPLISRGQLDRVHAIVSDTVADGARLVAGGTHKGLCYAPTVLTGVAPGMRAFEEEIFGPIAAVTVFDDLDEAARLANDGPYGLSAGIISGSVGRAMTLGAKLEVGHLHINDQTVDAGPHSPFGGMKASGNGTRISGPANLDEFTTWRWETVKAAATAYPF

SEQ ID NO: 29492 - protein, 456 aa, Perilla frutescens
MSLETVAAPPPATTVCVTGASGFIGSWIIMRLLERGYVVRATVRDPGDSKKVKHLIELPGADTNLTLWRADMNIEGSYDEAVQGCECVFHMATPMDFESDDPENEVIKPTVDGMLSIMRSCTKAKTVKKLIFTNSAGTLNVEEHQKPVYNEANWSDLDFIYSKKMTGWMYFVSKILAEKEAMKAAKESNINFISIIPPVVVGPFFMPTFPPSLITALSPITGNEAHYSIIKQGQFVHVDDLCEAHIFLFEHPAAEGRYICSSHDATIYDIAKMIGENWPEYHVPTEFEGIHKDIAVVSFSSKKLVDMGFSFKYTLEDMYRGAIESCREKGMLPFSTQIHTNGENKESLSNSQEKHSQINTNGENKDSILNSQINTNGENKDSILNSHDKHSQIHTNGENKESILNSQEKHSQIRTNGENKESIFNSLEKHDTDNNQEKELLPIPKEAHADRQEMQI

SEQ ID NO: 29493 - protein, 238 aa, Lycopersicon esculentum
MADPDTTRTVVGIIGNVISFFLFLSPGPTFVQILKAKSVMEFKPDPYIATVLNCAVWVFYGMPFVHPDSLLVITINGFGLAIELLYVSIFFIYSDWSKRQKIIIALVIEAIFMAILIFVTLTFLHGTKDRSMLIGIVAIVFNIIMYTSPLTVMKKVITTKSVKYMPFYLSLANFANGIVWACYALLKFDPYILIPNGLGSLSGLVQLILFAAFYRTTNWDEDEKEVELSTSKSNKSDV

SEQ ID NO: 29494 - protein, 378 aa, Arabidopsis thaliana
MESDLIDLFEGAKKAADAAALDGVTSSGPEVSQCIDALKQLKKFPVTYDTLVATQVGKKLRSLAKHPVEDIKSVATDLLEIWKKVVIEETAKAKKTEGTNGCKEAKVNKMDVEKPSNPAPVKVQKLQRGDSAKSIKVERKEPDNKVVTGVKIERKVPDIKVTNGTKIDYRGQAVKDEKVSKDNQSSMKAPAKAANAPPKLTAMLKCNDPVRDKIRELLMEALCRVAGEADDYERESVNASDPLRVAVSVESLMFEKLGRSTGAQKLKYRSIMFNLRDSNNPDLRRRVLTGEISPEKLITLSAEDMASDKRKQENNQIKEKALFDCERGLAAKASTDQFKCGRCGQRKCTYYQMQTRSADEPMTTYVTCVNCDNHWKFC

SEQ ID NO: 29495 - protein, 470 aa, Caulobacter crescentus CB15
MSSPQAVFERRDPVTGAVATTSIAMTADQARVAVDAAQAALPTWSALGPNARRALLSKAAAALEARADDFVAAMMGEIGATEGWARFNLMLAASMVREAAALTTQVSGEVIPSDKPGCLAMAVREPVGVILGIAPWNAPIILGVRAVATPLACGNTVVLKASESCPRTHELIAEAFAAAGLPEGALSIVTNAPADAAEVVGALIDHPAVRRINFTGSTAVGKIIAKRAAEHLKPVLLELGGKAPLIVLEDADLDEAVKAAAFGAFMNQGQICMSTERIIVVDAIADAFVAKFAAKASSLAVGDPREGKTPLGAVVDLKTVTHVQGLVADALADGAVQVSGGPANGVLMPATVVDKVTPAMRLFREESFGPVVAVIRARDEEHAIALANDTEYGLSASVFTRDIARGLKVARRIQSGICHVNGPTVHDEAQMPFGGVKASGYGRFGGKAGVDAFTELRWITVETQPGHFPI

SEQ ID NO: 29496 - protein, 398 aa, Idiomarina baltica OS145
MFELMDNYESEAVIKVIGVGGGGGNAVQHMVKESIEGVQFIAANTDAQALRNHSADVTIQLGSDITKGLGAGANPEVGRQSAEEDRDNIRAQLEGADMVFIAAGMGGGTGTGAAPVVAEVAKELGILTVAVVTKPFPFEGKKRMAVAEEGINALAQSVDSLITIPNEKLLKVMGRGTTLLDAFSAANNVLLGAVQGIAELITRPGLINVDFADVRAVMKEMGTAMMGTGVASGEDRAQEAAEMAINSPLLEDIDLSGARGVLVNVTAGMDMSIDEFETVGNTVKAFASDNATVIVGTVIDTEMSDEITCHCCCDRYCCRAQAQISPWSITQHKHLSANRAATYRRDLDCSSTAPHYDEEQEPAAEHKAEPARKPAPKQNAEKELDYLDIPAFLRKQVD

SEQ ID NO: 29497 - protein, 596 aa, Triticum aestivum
MAQAWAFLLPVLVLGSYVTSLFLPTYITGPLCGGDGGGRSLFLCAQAPKDQDPSPASTMYKTAFHFQPAKNWMNDPSGPMYFNGIYHEFYQYNLNGPIFGDIVWGHSVSTDLVNWIGLEPALVRDTPSDIDGCWTGSVTILPGGKPIIIYTGGDIDQNQAQNIAFPKNRSDPYLREWIKADNNPVLRPDEPGMNSIEFRDPTTGWIGPDGLWRMAVGGELNGYSAALLYKSEDFLNWTKVDHPLYSHNGSNMWECPDFFAVLPGNNAGLDLSAAIPQGAKHALKMSVDSVDKYMIGVYDLHRDAFVPDNVVDDRRLWLRIDYGTFYASKSFFDSNKNRRIIWGWSRETDSPSDDLAKGWAGLHTIPRTIWLAGDGKQLLQWPVEEIESLRTNEINHQGLELNKGDLFEIKEVDAFQADVEIGFELASIDDADPFDPSWLLDPEKHCGEAGASVPGGIGPFGLVILASDNMDEHTEVYFRVYKSQEKYMVLMCSDLRRSSLRPDLEKPAYGGFFEFDLEKERKISLRTLIDRSAVESFGGGGRVCITSRVYPAVLADVGSAHIYAFNNGSATVRVPQLSAWTMRKAQVNVEKGWSAI

SEQ ID NO: 29498 - protein, 504 aa, Xanthomonas oryzae pv. oryzae KACC10331
MTQTNGFDALHAHAQRLRGAAIPALLAAEPERPTQYAWQVGPLYFNFARQKYDRAALDALFAIARERDLAGAFQRLFRGEQVNVTEQRAALHTALRGDLTDAPVASEAYATAAEVRQRMGALIQQLEATDVTDIVSVGIGGSDLGPRLVADALRPVSGARLRVHFVSNVDGAAMQRTLATLDPARTAGILISKTFGTQETLLNGSILHAWLGGSERLYAVSANPERAAKAFDIAPGRVLPMWDWVGGRYSLWSAVGFPIALAIGFERFEQLLEGAAQFDAHALNTPLEENVAVLHGLTAVWNRNLLGSATHAVMTYDQRLALLPAYLQQLVMESLGKRVKLDGSAVDSDTVSVWWGGAGTDVQHSFFQALHQGTSVVPADFIGTVHNDDPYAENHVALMANVLAQTEALANGQDSSDPHRSYPGGRPSTVILLDALTPQALGALISMYEHSVYVQSVMWGINAFDQFGVELGKQLASQLLPALKGESADVADPVTRELLSKLRG

SEQ ID NO: 29499 - protein, 302 aa, Glycine max
  misc_feature (11)..(11): Xaa can be any naturally occurring amino acid
GAVFKGMLSRXILVAVKILNDTVGDGKDFINEVGTMGKIHHVNVVRLLGFCADGFHRALVYDFFPNGSLQRFLAPPDNKDVFLGWEKLQQIALGVAKGVEYLHLGCDQRILHFDINPHNILIDDHFVPKITDFGLAKLCPKNQSTVSITAARGTLGYIAPEVFSRNFGNVSYKSDIYSYGMLLLEMVGGRKNTNMSAEESFQVLYPEWIHNLLKSRDVQVTIEDEGDVRIAKKLAIVGLWCIEWNPIDRPSMKTVIQMLEGDGDKLIAPPTPFDKTSSSRTSVVAPTRRQNFELEIINEIEE

SEQ ID NO: 29500 - protein, 108 aa, Acidithiobacillus ferrooxidans
MSDAILYVSDDSFETDVLKSSKPVLVDFWAEWCGPCKMIAPILEEIADEYADRLRVAKFNIDENPNTPPQYAIRGIPTLLLFKAGKLEATKVGALSKAQLTAFLDSQL

SEQ ID NO: 29501 - protein, 961 aa, Kineococcus radiotolerans SRS30216
MTSPTPLRTELPEFAPEPAALPFSARHIGPDAAAVARMLQVVGLTSTEELVDRAVPAGIRDGVLDLPEALDETSVTAALRELAGRNRVVPSMIGLGYFGTRTPAVVRRNVLEDPSWYTAYTPYQPEISQGRLEALLNFQTAVTDLTGLDVANASLLDEGTAAAEAMTLARRTSKAPRGAVFAVDADVLPQTLAVLRTRAVPLGIDLVTVDLDTPDPLSVVGECGVFGVLLQYPGTSGRVRDLAAVVADAHARGALAITAADLLALTLLVAPGEFGADVAVGSSQRFGVPMGAGGPHAAYMAVRKGIERSLPGRLVGVSVDADGNTAYRLALQTREQHIRRDKATSNICTAQVLLAVMAGCYAVWHGPEGLRAIASQVARRAAGIAAALRAGGVEVVHDTFFDTVLARVPGRAGDVVAAALAAGVNLRLVDADHVGLTVDETTSEAHVAAALRGFGLDPVEATADPALPAALRRTSDFLTHPVFSRHRSETAMLRYLRRLSDADYALDRGAIPLGSCTMKLNATTELEPVSWPEFADLHPYAPADQLAGTAQLVADLEGWLAEVTGYDAVSLQPNAGSQGEFAGLLAIRAYHLAQGRGERTVCLIPSSAHGTNAASAVMAGLRVVVVTCDEGGNVDLDDLRAKVAEHADDLAALMVTYPSTHGVYEESIREVCGLVHDAGGQVYVDGANLNALVGLARPGKFGADVSHLNLHKTFCIPHGGGGPGVGPVAVREHLAPFLPSTAPGGDLDGRGVGMVSAAPFGSAGILPIPWAYLRLMGPDGLRAATVQAVLSANYVAARLADAFPVLYRGPGGLVAHECILDLRPMTKATGVTVDDVAKRLVDHGFHAPTMSFPVAGTLMVEPTESEDLAELDRFCDAMLAIAAEVREIADGRWAVEDSPLRHAPHTAASLVGEWNHPYTREEAVYPNGMDPRSKYWPPVRRIDGAAGDRNLVCSCPPLSEY

SEQ ID NO: 29502 - protein, 196 aa, Wolbachia endosymbiont of Diplolepis fructuum
LIVIPNQNLFRIANEKTTFADAFQLADNVLHIGIRGVTDLMIMPGLINLDFADIETVMSEMGKAMIGTGEAEGEDRAISAAEAAISNPLLDNVSMKGAQGILINITGGGDMTLFEVDASANRVREEVDENANIIFGATFDQAMEGRVRVSVLATGIDSCNNNSSVNQNKIPAEEKNFKWPYNQIPILETKEYASTE

SEQ ID NO: 29503 - protein, 849 aa, Rhodobacter sphaeroides 2.4.1
MDIEQKLAKERRARLAAERLLEYKQRELFAANEKLAIHARALSDQIIEQRAVVKTALSEAEKLKGQNSRFLSELERAHTAAVMAERRLWDSIDAIEDGFAVFDAGQRLVAANEAYRCHFEGLEVRPGMALADLLQLATTHGLIDLRGEPADHWRQRMIRRWDEDPVEPEIVRRCTGQWLRLVNRRARDGDMVSLLIDITEQMRLRAAIDAIPDGFVLFDRAERLVLCNDRYRAIYPRSAEALRPGAPFEEILRHGLAHGQFPEAAGREEEWLADRLAAFRHLGGAAEQQLDDGRWLRVIEHETPDGGRVGLGVDITELKRQQAALESARAAAEAASRAKSAFLANMSHEIRTPMNGIVGMADLLCETVLTEDQRLFSETIRSSGEALLVIINDILDYSKIEANRLTLHPEPFDLERTIHEVAMLLQPKARAKGIDLLIDFDLFLPTRFVGDPGRLRQVLTNLIGNAVKFTAAGHVLIRVVGLEVAPGRHDLRVTVEDTGIGIAPEHLDHVFGEFNQIEAEATRRFEGTGLGLAITRRLIELMQGAVWVESEPGRGSCFGFRLTLPAADDEAAPPVPIEVRRALVVDGQFINRTILERQLAPCGISVTLCRSGIEALAELSADAGYDLLLTDHEMPDLDGLALAQRVRAGGFSMPILLLTSNPSAVRDHPAEALLAGVLQKPLLRSDLYRRLQSLTAPPAAPDRPPPVPVPALRRMRVLAAEDNRTNQLVFGKMVRDLDIDLTFADNGREAVELYDRIRPDLVFMDISMPEMDGRAAARAIRARERGGTHVPIVALTAHALESDARASAAAGIDRTLTKPLRRAMILETLAAFCPAGTRPIQPALVEGPD

SEQ ID NO: 29504 - protein, 490 aa, Solibacter usitatus Ellin6076
MHSNILSIPLMAKKTPITVAHGDGIGPEIMNATLQILEAAGAALEIETIEIGEKVYLRGNSAGIEPSAWDSLLRTQVFLKAPITTPQGGGFKSLNVTTRKTLGQYANVRPCVSYHPFIDTKHPNMDVVIVRENEEDLYAGIEYQNTPEVMSCIKLISRPGSEKIVRYAFEYARLHNRKKVTCFMKDNIMKMTDGLFHKVFDEIGAQYPDIEKEVWIVDIGAAKMADTPEAFDVIVMPNLYGDILSDVAAQIAGSVGLAGSANIGEKCAMFEAIHGSAPRRAGQNLANPSGLLLGAVLMLVHINQPEAAAKVHNAWLRTIEDGVHTYDVFTEGVSSKKVGTKEFAAAVIERIGQKPNILKPVTYAHRPEKAAPAVQAERPAVAMELKGIDVFVYWPSRNPNTLAEAVGKLAVDGVKLQMIDNRGVKVWPAGRAETFCTDSFRCRFMADGATDMGKLLDVARRISDAGIDIAVTETLRNFDGVAGFTLAQGQ

SEQ ID NO: 29505 - protein, 196 aa, Wolbachia endosymbiont of Diplolepis mayri
LIVIPNQNLFRIANEKTTFADAFQLADNVLHIGIRGVTDLMIMPGLINLDFADIETVMSEMGKAMIGTGEAEGEDRAISAAEAAISNPLLDNVSMKGAQGILINITGGGDMTLFEVDAAANRVREEVDENANIIFGATFDQAMEGRVRVSVLATGIDSCNNNSSVNQNKIPAEEKNFKWPYNQIPILETKEYASTE

SEQ ID NO: 29506 - protein, 200 aa, Wolbachia endosymbiont of Diplolepis californica
LIVIPNQNLFRIANEKTTFSDAFKLADNVLHIGIRGVTDLMVMPGLINLDFADIETVMSEMGKAMIGTGEAEGEDRAISAAEAAISNPLLDNVSMKGAQGILINITGGGDMTLFEVDAAANRVREEVDENANIIFGATFDQAMEGRVRVSVLATGIDGHNNKSETSPISQSEDSEKEKFKWPYSHSESTQDKTLETKPTE

SEQ ID NO: 29507 - protein, 240 aa, Corynebacterium efficiens YS-314
MTMSAAVAHPLPEPHDSSHHNRMNTLRAGVLGANDGIVSVAALLLGVIATGASDVVIFGAGIASTIAGAVSMALGEYVSVSSQKDTEKVLIEKERRELAEDPKAEHAELAGILQSYGISDETAHRAATEISSTNPLAAHLQLELGIDDSEPTKPMAAAASSAIAFLLGALLPLLSVFIAPEGWTAVVVFVVTLITLALTGALSARLAGTSVPRACARLVIGGALGLALTYGVGALFDITA

SEQ ID NO: 29508 - protein, 549 aa, Mannheimia succiniciproducens MBEL55E
MQNINPTSTAAWKALEAHKGTLENTTINDLFQQEKNRFADYSLTFNNEILVDFSKNKITRETLNLLRRLAKECALDEAKEAMFSGEKINRTENRAVLHTALRNRSNTAVLVDGKDVMPEVNEVLAKMKAFSERVISGEWKGYTGKAITDVVNIGIGGSDLGPYMVTEALRPYKNHLNMHFVSNVDGTHIAEVFKKTNPETTLFLVASKTFTTQETMTNAKSARDWFLATAKDEKHVAKHFAALSTNAAEVEKFGIDTDNMFGFWDWVGGRYSLWSAIGLSIILSVGFENFEALLSGAHEMDKHFRNTPIEQNIPATLALVGLWNTNFQGAQTEAILPYDQYMHRFAAYFQQGNMESNGKYVGRDGKVISNYQTGPIIWGEPGTNGQHAFYQLIHQGTTLIPCDFIAPAKTHNPLADHHNKLLSNFFAQTEALAFGKTKETVEAEFLKAGKSLDEVKDVVPFKVFAGNKPTNSILLQEITPFSLGALIAMYEHKIFVQGVIFNIFSFDQWGVELGKQLANRILPELSGDEQVTGHDSSTNGLINQFKAWR

SEQ ID NO: 29509 - protein, 200 aa, Wolbachia endosymbiont of Diplolepis radicum
LIVIPNQNLFRIANEKTTFSDAFKLADNVLHIGIRGVTDLMVMPGLINLDFADIETVMSEMGKAMIGTGEAEGEDRAISAAEAAISNPLLDNVSMKGAQGILINITGGGDMTLFEVDAAANRVREEVDENANIIFGATFDQAMEGKVRVSVLATGIDGRNNKSETSPISQSEDSEKEKFKWPYSQSESTQDKTLETKPAE

SEQ ID NO: 29510 - protein, 185 aa, Bacillus thuringiensis serovar konkukian str. 97-27
MNKQKFYTNLSKEVSYALRHAQWKYELELDENGWVSVEQLLHALHQSIEWRDVKIEDLKIMIEKSEKKRHELKENKIRALYGHSIPMKIVKEEGVPPEFLYHGTSPRFLNSIESNGLSPMSRQYVHLSEDIITAELVGKRKDKHPIILEVNTGKAREEGVKFYLGNEKVWLADEIPSEFIAINKN

SEQ ID NO: 29511 - protein, 104 aa, Arabidopsis thaliana
MLVTAPMASEAAISCGAVTGSLGQCYNYLTRGGFIPRGCCSGVQRLNSLARTTRDRQQACRCIQGAARALGSRLNAGRAARLPGACRVRISYPISARTNCNTVR

SEQ ID NO: 29512 - protein, 547 aa, Anabaena variabilis ATCC 29413
MNTAELLVQCLENEGVQYVFGLPGEENLHVLEALKHSSIQFITTRHEQGAAFMADVYGRLTGKAGVCLSTLGPGATNLMTGVADANLDGAPLVAITGQVGTDRMHIESHQYLDLVAMFAPVTKWNKQIVRPSITPEVVRKAFKRSQSEKPGAVHIDLPENIAAMPVEGKPLQKDNIEKTYASFASIRAAAAAISQAVNPLILVGNGAIRAKASDAVTQFATQMNIPVANTFMGKGVIPYTHPLALWSVGLQQRDFITCGFDNTDLVIAIGYDLIEFSPKKWNPEGKIPIVHIGADSAEIDSSYIPNVSVIGDISDSLVEILKVADRQGKPNPYAISLRGNIREDYEQYANDDGYPIKPQKLIYDLRQVMGPDDIVISDVGAHKMWIARHYHCHSPNTCIISNGFAAMGIAIPGALAAKLVYPNRKVVAATGDGGFMMNCQELETALRVGTPFVTLIFNDGGYGLIEWKQENQFGKGQSSFVHFGNPDFVKLAESMGLKGYRVESALDLIPVLKEALAQDVPAVIDCPVDYRENRRFTQKAGELSCSV

SEQ ID NO: 29513 - protein, 321 aa, Anaplasma phagocytophilum HZ
MSEVHKDAVKVLILGSGAAGCTAAIYAGRANLNPVLVTGMQPGGQLTITTDVENYPGFSAIEGPKLMEYMQEQAVKSGATLLTDEISEIDASVYPFKCTSMFGETLQAYSIIVATGAQAKWLGLESEQNFKSKGVSACATCDGAFFKDEVVAVIGGGNTAVEEALYLTRSSKKVFLIHRRDKLRAEAVMQQRLFSNSKIEVIWNSVVKEILGDSEGKKVTSLLLQSTVDSTESLLDVGGVFVAIGHTPNTQVLKNMLGAKVNLDDEGYVITAPGTTITSCPGIFAAGDVCDKVYRQAVVAAGSGCMAALDAEKYLAEKGIE

SEQ ID NO: 29514 - protein, 214 aa, Desulfovibrio vulgaris subsp. vulgaris str. Hildenborough
MNQHLLEQFGTTHERVERGLAALRTGQGVLVADDADRENEGDLIFAAETLTPAQMAMMIRECSGIVCLCLPEERVSRLGLPMMVAHNTSSMGTAFTISIEAAEGVTTGVSAADRVRTVKAAIDDAACPGCLRSPGHVFPLRASPGGVLERRGHTEATVDLMRLAGLKPYGVLCELTNPDGTMARLPQLVDFAQRNRMTVLTVEDLVAYRQDKGL

SEQ ID NO: 29515 - protein, 416 aa, Aspergillus oryzae
MPLSPEQIQLIKATVPVLQQHGTTITTVFYNNMLTAHPELNAVFNNANKVNGHQPRALAGALFAYASHIDDLGALGPAVELICNKHASLYIQPEQYQIVGKFLLEAMGEVLGDALTPEILDAWATAYWQLADLMIGREAELYKQADGWTDFRHFRVAKKVPESSEITSFYLEPVDGKPLPKFRPGQYISVQVFVDSLKFPQCRQYSLSDAPRSDYYRISVKREAGLNTAEPNAPAHPGYVSNILHANIKEGDVVKVSHPFGDFYLSDADSPSPIVLIAAGVGLTPLTSILKTLTSNPPDAPQRKIHYIHGARSAATRAFKKDVDSLAEKYPNLHATFFETHPAAEEKQGEDYDHQGRVDLSKLDKSKDLFLDDPKTEYYVCGPDRFMTSTRAALAAEGVSPDRIKLELFGTGGVPA

SEQ ID NO: 29516 - protein, 379 aa, Euglena mutabilis
IGHVDHGKTTLTAAITMTLAATGNSKAKRYEDIDSAPEEKARGITTNTAHVEYETKNRHYAHVDCPGHADYVKNMITGAAQMDGAILVVSGADGPMPQTKEHILLAKQVGVPSIVVFLNKEDQVDDKELLELVELEVRETLNNYEFPGDEIPVVSGSALLSVEALTQNPKITKGENKWVDKILDLMDKIDAYIPTPIRDTDKDFLMAVEDVFSITGRGTVATGRVERGTVKVGETVELVGLKVTKTTTVTGLEMFQKSLDEALAGDNVGILLRGVQKNDVERGMVISKPGTINPHTKFDAQVYILTKEEGGRHTPFFEGYRPQFYVRTTDVTGKIESFRADNDTPAQMVMPGDRVKMEVELIQPIAIEKGMRFAIREGG

SEQ ID NO: 29517 - protein, 273 aa, Staphylococcus aureus
GTPYKESDIEPYYTDIRHGKRPSEEELQDLKDRYEFIGGLSPLAGTTDDQADALVSGLNKAYADVEFKLYLGLKHISPFIEDAVEQMHNDGITEAITVVLAPHYSSFSVGSYDKRADEEAAKYGIQLTHVKHYYEQPKFIEYWTNKVNETLAQIPEEEHKDTVLVVSAHSLPKGLIEKNNDPYPQELEHTALLIKEQSNIEHIAIGWQSEGNTGTPWLGPDVQDLTRDLYEKHQYKNFIYTPVGFVCEHLEVLYDNDYECKVVCDDIGANYYR

SEQ ID NO: 29518 - protein, 404 aa, Idiomarina baltica OS145
MRRAVITGLGIVSSIGTNQKEVLESLRTGKSGIERSESFAEMGLRCQVWGPVRLDVKDHIDRKALRFMGDSAAYAYIAMQQAIEDAGLSEEEVSNPRTGLVVGSGGASGEHQVAAADILRERGVKRVGPYMVPRCMASTTSACLATPFKIKGINYSISSACATSAHCIGHALELIQFGKQDRVFAGGGEELHWTLGMEFDAMGALSTKYNDTPEKASRTYDRDRDGFVPAGGGGILVIEELEAAKARGATIYAEIVGYGATSDGYDMVAPSGEGAIRCMKMAMETVDTPIDYLNTHGTSTPVGDVKELEAIREVFPEKTPFISATKAMTGHALGAAGVHEAIYSLLMMKNGFVTPSINIDNLDEAAEGMNIVREPTEAKLRTVMSNSFGFGGTNASLVLREYQD

SEQ ID NO: 29519 - protein, 110 aa, Brassica napus
MAESIRFIRPINLKPHMMEVCNCIEPQWPADELLMKYQYISDFFIAVAYFSIPLELIYFVKKSAVFPYRWVLVQFGAFIVLCGATHLINLWTFTTHSRTVALVMTTRQVL

SEQ ID NO: 29520 - protein, 159 aa, Burkholderia sp. 383
MSTLYSFSAETLAGAPASLDAYRGKVLLIVNTASECGFTPQYAGLQKLYDQYAARGFYVLGFPCNQFGKQEPGDAAQIGAFCERNYGVTFPMFAKIDVKGDHAHPLYRYLTDEAPGILGLKAIKWNFTKFLVDREGRIVKRYAPSTKPDEIAADIDKLL

SEQ ID NO: 29521 - protein, 411 aa, Roseovarius nubinhibens ISM
MPVLVMKFGGTSVANLDRIRRAAKRVGVEVAKGYDVIVIVSAMSGKTNELVGWVGETSPLYDAREYDAVVSSGENVTAGLMALTLQEMDVPARSWQGWQVPVKTTSAHSAARIEEIPTDNITAKFGEGMRVAVVAGFQGVSPEGRITTLGRGGSDTTAVAFAAAFDAERCDIYTDVDGVYTTDPRIASKARKLDKIAFEEMLELASLGAKVLQTRSVELAMRYNVKLRVLSSFEEQSDAAGTLVCDEEEIMESNVVSGIAYSRDEAKMTLISVADRPGIAAAIFGPLSEAGVNVDMIIQNIAEEGRTDMTFSCPTDQVKRAEKAMADAKARGDINYHDLVADTDVAKVSAVGIGMRSQSGVAAKMFKTLSDEGVNIKVIATSEIKISVLIDRKYMELAVQALHDAFELDKA

SEQ ID NO: 29522 - protein, 196 aa, Wolbachia endosymbiont of Diplolepis bicolor
LIVIPNQNLFRIANEKTTFADAFQLADNVLHIGIRGVTDLMIMPGLINLDFADIETVMSEMGKAMIGTGEAEGEDRAISAAEAAISNPLLDNVSMKGAQGILINITGGGDMTLFEVDAAANRVREEVDENANIIFGATFDQAMEGRVRVSVLATGIDSCNNNSSVNQNKIPAEEKKFKWPYNQIPTLETKEYASTE

SEQ ID NO: 29523 - protein, 552 aa, Salinibacter ruber DSM 13855
MAPFPHSPIPNRPHAHTQTMPDTIEVFDTTLRDGTQGEHVTLSARDKMRIARRLEAFGIDVIEGGWPGSNPTDQAFFEAASGETWAHTSICAFGSTRHASNAPSEDANLQALIEADTDVVSIFGKSWTLHVEQALGVSRETNLDLIRSSVAFLREHGKRVIYDAEHFFDGFADHPAYALRTLRAAAEAGADTLVLCDTNGGSLPHDIYDVTAAVYEDFDTTLGIHAHNNGGCAVANSLAAVRAGARHMQGTINGLGERCGNADLCAVIPDLQLKMDFECVDPDRLDDLVDLARFTNEVANLDPDDGAPYVGRSAFTHKGGVHVSAVMEAPSTYEHVEPNVVGNRRRALVSDLSGRSNIQYKAKEMGIDLGSDAAAQAVERIKELEHLGYEFQGAEASFELLLRTLQDEVPDFFGLDRMRVWSGQDDEAQTVEASLALTVQDERTLAVAEGNGPVDALSNAMREGLLSFYPSLDGVRLSDYKVRVLTPQDGTAATVRVLIEHGDGARTWNTVGVSENILDASWQALADGMRYALFHAAPTPTAGPAPDPAASG

SEQ ID NO: 29524 - protein, 119 aa, Brassica napus
  misc_feature (112)..(112): Xaa can be any naturally occurring amino acid
MYADSGLMISYMHNCPPDFQQIEDLFKSYKLSDDEMNNAFAKSTNITDYDLGEEGDLFKAPDPILEEPIVAVDPLSAALTMISCGEDSSQGLCELPDLGSLQSGQELLDKAXFYECEQD

SEQ ID NO: 29525 - protein, 196 aa, Wolbachia endosymbiont of Diplolepis nodulosa
LIVIPNQNLFRIANEKTTFADAFQLADNVLHIGIRGVTDLMIMPGLINLDFADIETVMSEMGKAMIGTGEAEGEDRAISAAEAAISNPLLDNVSMKGAQGILINITGGGDMTLFEVDAAANRVREEVDENANIIFGATFDQAMEGRARVSVLATGIDSCNNNSSVNQNKIPAEEKNFKWPYNQIPTLETKEYASTE

SEQ ID NO: 29526 - protein, 161 aa, Brevundimonas sp. SD212
MAWLTWIALFLTAFLGMEAFAWIMHRYVMHGFLWSWHRSHHEPHDHPLEKNDLFAVVFAAPAIVMVAVGLHLWPWALPVGLGITAYGMVYFFFHDGLVHRRFPTGFSGRSGFWTRRIQAHRLHHAVRTREGCVSFGFLWVRSARALKAELAQKRGSSSSGA

SEQ ID NO: 29527 - protein, 200 aa, Wolbachia endosymbiont of Diplolepis spinosa
LIVIPNQNLFRIANEKTTFSDAFKLADNVLHIGIRGVTDLMVMPGLINLDFADIETVMSEMGKAMIGTGEAEGEDRAISAAEAAISNPLLDNVSMKGAQGILINITGGGDMTLFEVDAAANRVREEVDENANIIFGATFDQAMEGRFRVSVLATGIDGRNNKSETSPICQSEDSEKEKFKWPYSQSESTQDKTLETKPDE

SEQ ID NO: 29528 - protein, 89 aa, Arabidopsis thaliana
  misc_feature (22)..(22): Xaa can be any naturally occurring amino acid
  misc_feature (37)..(37): Xaa can be any naturally occurring amino acid
  misc_feature (42)..(42): Xaa can be any naturally occurring amino acid
  misc_feature (57)..(57): Xaa can be any naturally occurring amino acid
  misc_feature (62)..(62): Xaa can be any naturally occurring amino acid
  misc_feature (66)..(66): Xaa can be any naturally occurring amino acid
  misc_feature (73)..(73): Xaa can be any naturally occurring amino acid
  misc_feature (75)..(75): Xaa can be any naturally occurring amino acid
  misc_feature (77)..(77): Xaa can be any naturally occurring amino acid
  misc_feature (85)..(85): Xaa can be any naturally occurring amino acid
MASSMLSSAAVVTSPAQATMVXPFTGLKSSAAFPVTXMTNKXITSIASNGGRVSCMXVWPPXGKKXFETLSYXPXDXSDVELAKXVDYP

SEQ ID NO: 29529 - protein, 321 aa, Wolbachia sp.
KSLCDKKIQLGINLTKGLGAGALPDVGKGAAEESIDEIMEHIKDSHMLFITAGMGGGTGTGAAPVIAKAAREARAVVKDKGAKEKKILTVGVVTKPFGFEGVRRMRIAELGLEELQKYVDTLIVIPNQNLFRIANEKTTFADAFQLADNVLHIGIRGVTDLMIMPGLINLDFADIETVMSEMGKAMIGTGEAEGEDRAISAAEAAISNPLLDNVSMKGAQGILINITGGGDMTLFEVDSAANRVREEVDENANIIFGATFDQAMEGRVRVSVLATGIDSCNNKLEASSVNQNKIPAEEKNFKWPYNQIPTLETKEYASTEQ

SEQ ID NO: 29530 - protein, 402 aa, Arabidopsis thaliana
MTMMSDLSQDLLEEILSRVPRTSLGAVRSTCKRWNTLFKDRILCKAEETRDQFRFIMKKYKLCSMRFDLNGTLNEDGGTEFVDPSIKELGHFFNQVKISKVFQCDGLLLCVTKEDNIRLVVWNPYLGQIRWIESGNTNYRLFDRYAIGYDNNRKHKILRFLEYYNFNMKHRFLEYEIYDFSSNSWRVLDIAPRWEIESYQRGASLKGNTYFIAKEKIEYEEDGEFPEPADNLLCFDFTTESFGQFLPLPFQHYLYDVGALSSLGDEKLAALFQCGDTDLSEVEIWVTTLTETNTVSWNPFLKVDMEPHYGRSFMFDYYGGSFFIDEEKKLAVVFQFDESGMTRYEDATYIIGENGYVKKVRLGEAPANQGGYCFPSVCFSSYVPSLVQINQIVGFKKEREEE

SEQ ID NO: 29531 - protein, 419 aa, Francisella tularensis subsp. holarctica
MSTYTVVIIIFILICISAFFSSSETAMMALNKYKLKHLAKKNHRAAKRSLSLVRNPERLLVAILIGNTFANIFAGTVISSYSEDHFGDLGLLIATIVVTILVLVFGEIIPKSFAAIYPQRLAFPFSLPLKIIMLILYPAVIFLSMVSKVTLKLFGVKIEAVNNESLDKEEIQTVVNESNAKLGAKNKNMLLGVLELDKVLVQEVMTHFNKIEYIDLSNSIDKILARIAKMRSLNIILCENGVNNIIGVIRLKEITNLLISSKKGQISKAALRKIAQEAYFIPETVSLQTQLINFQQKSKRFAIVVDEYGNVCGTVTIEDIMEEIVGEFSDRFDVNNNIRKLEDNSYLIGGSATLREINRHIGIEFESEDAKTLSGLIIEEIENLPSGPCCIKYNNILLEITNIRDNKIVSIKLTITTET

SEQ ID NO: 29532 - protein, 317 aa, Wolbachia sp.
KSLCDKKIQLGINLTKGLGAGALPDVGKGAAEESIDEIMEHIKDSHMLFITAGMGGGTGTGAAPVIAKAAREARAVVKDKGAKEKKILTVGVVTKPFGFEGVRRMRIAELGLEELQKYVDTLIVIPNQNLFRIANEKTTFADAFQLADNVLHIGIRGVTDLMIMPGLINLDFADIETVMSEMGKAMIGTGEAEGEDRAISAAEAAISNPLLDNVSMKGAQGILINITGGGDMTLFEVDSAANRVREEVDENANIIFGATFDQAMEGRVRVSVLATGIDSCNNNSSVNQNKIPAEEKNFKWPYNQIPISETKEYASTE

SEQ ID NO: 29533 - protein, 238 aa, Wolbachia endosymbiont of Cimex lectularius
MPIAELGLEELQKYVDTLIVIPNQNLFRIANEKTTFSDAFKLADNVLHIGIRGVTDLMVMPGLINLDFADIETVMSEMGKAMIGTGEAEGEDRAMSAAEAAISNPLLDNVSMKGAQGILINITGGGDMTLFEVDAAANRVREEVDENANIIFGATFDQAMEGKVRVSVLATGIDGGAVCDDKSETPSVNQSETSEKEKFKWSYSQTPVPETKPAEQVNEGVKWSNNIYDIPAYLRRKK

SEQ ID NO: 29534 - protein, 590 aa, Pseudomonas syringae pv. syringae B728a
MCGLAGELRFDHQPADLAAVERITHELAPRGPDAWGFHSQGPVALGHRRLKIMDLSDGSAQPMIDSNLGLSLAFNGAIYNFPELRAELESLGYQFHSGGDTEVLLKGYHAWGADMLPKLNGMFAFAIWERDSKQLFIARDRLGVKPLYLSKTDKRLRFASSLPALLKGGDISGMLDPVALNHYLNFHAVVPAPRTLLAGVEKLPPASWMRIDASGKVEQKVWWTLPYGPHEDEKNLTLEDWRDRVLDSTREAVAIRQRAAVDVGVLLSGGVDSSMLVGLLREVGVEDLSTFSIGFQDAGGERGDEFQYSDLIAKHYGTRHHQLRIQEREIIEQLPAAFRAMSEPMVSHDCIAFYLLSREVSKHCKVVQSGQGADELFAGYHWYPQVDGASDPVAAYRDAFVDRSYAEYAETVQPKWRTANDAAGDFVRDHFAQPGASAAVDKALRLDSTVMLVDDPVKRVDNMTMAWGLEARTPFLDYRLVELSARIPGKFKLPDGGKQVLKEAARMVIPSEVIDRKKGYFPVPGLKHLQGDTLNWVRELLTDSSQDRGLFNPAMVDKLLTNPEGQLTPLRGSKLWQLAALNLWLSEQGL

SEQ ID NO: 29535 - protein, 512 aa, Oryza sativa
MATAAACISFASPSPARVVIRRQTRASASASATDRQEVVSPKRRLPLRKVPGDYGPPVVGAIRDRYEYFYGPGGRDGFFAARVRAHRSTVVRLNMPPGPFVARDPRVVALLDAASFPVLFDTSLVDKTDLFTGTFMPSTDLTGGYRVLSYLDPSEPNHAPLKTLLFYLLSHRRQQVIPKFREVYGDLFGLMENDLARVGKADFGVHNDAAAFGFLCQGLLGRDPAKSALGRDGPKLITKWVLFQLSPLLSLGLPTLVEDTLLHSLRLPPALVKKDYDRLADFFRDAAKAVVDEGERLGIAREEAVHNILFALCFNSFGGMKILFPTLVKWLGRAGARVHGRLATEVRGAVRDNGGEVTMKALAEMPLVKSAVYEALRIEPPVAMQYGRAKRDMVVESHDYGYEVREGEMLFGYQPMATKDPRVFARPEEYVPDRFLGEDGARLLRHVVWSNGPETAAPTLHDKQCAGKDFVVLVARLLLVELFLRYDSFDVEVGTSTLGSSVTVTSLKKATF

SEQ ID NO: 29536 - protein, 323 aa, Aspergillus oryzae
MGIFDYDFLYSQLFIRPAYPTTSFTNQTIIITGSNVGLGLEAARHFTRLGAAKVILAVRNRSAGEEARQSIERSTGTTGICEVWDLDLASHESVLAFAKKVAELPRLDVFIANASIATGTFQLAEGHERTITVNVINTILLELLVLPTLRKSARLHPGTKPRLTTVVSEVHAWAKFAERSAENVFKALDDKEQANMPERYELSKLLQVLLLREMVAQGAGDSVIINMVNPGFCHSRLGREMGLAFALLQMVLARSTEVGSRTLVAGAASGEESHGAYMTNGKVDNGALSTFVRSEEGKKTQMKLWAELVEILEALEPGCTRVV

SEQ ID NO: 29537 - protein, 273 aa, Staphylococcus aureus
GTPYKESDIEPYYTDIRHGKRPSEEELQDLKDRYEFIGGLSPLAGTTDDQADALVSALNKAYADVEFKLYLGLKHISPFIEDAVEQMHNDGITEAITVVLAPHYSSFSVGSYDKRADEEAAKYGIQLTHVKHYYEQPKFIEYWTNKVNETLAQIPEGEHKDTVLVVSAHSLPKGLIEKNNDPYPQELEHTAFLIKEQSNIEHIAIGWQSEGNTGTPWLGPDVQDLTRDLYEKHQYKNFIYTPVGFVCEHLEVLYDNDYECKVVCDDIGANYYR

SEQ ID NO: 29538 - protein, 545 aa, Neorickettsia sennetsu str. Miyayama
MITPEEKLSALRRIMEDNRMEGFLITISDEFLLESPLSYNNRIKWLTGFCGSFAMVLITCEKAYFFTDSRYLIQVKLEVSEIYTRLQFSLAEIERVIKESCIRRICYDSRLLNRAMLSFFRCQMEPLDWNPIDCLWDRNTVSVGRVVVHPLCYAGLSSQEKCKQIINITGGNNYFFSNSESVCWLANIRGSDLEYTPVVCCRAILYSNGLLRIFLWGQVEDLPSLESHIEILRLEELQFYLTQLKSVALDEQSVNIYYLNLIRDRDIQITHLQDPSVIMRACKNHIELEGSIAAHKRDGLALTKFLNWLKVNESSDELASAEMLLSFRKEQELFFSLSFPTISAFGPHGAIVHYTPSKKSNLQFKPGNLYLVDSGAQYLDGTTDVTRTVAIGEPTEEQKFHYTIVLKAHIGLAKAVFPAGTTGRQLDVLARSHLWSYKLDYAHGTGHGVGSFLNVHEGPHSFGSEVPLKVGMIISNEPGLYFEGKYGIRLENLMYVKEAGDGFLSFAPLTLVNFDENLIRHEMLSDSESRWLEDYSDLVRTTHRS

SEQ ID NO: 29539 - protein, 88 aa, Capsicum annuum
MSQDLKKVKQEDDQLKDSLPPAKREVNRCSGCRRKVGLTGFRCRCGELFCGEHRYSDRHDCSYDYKTAGREAIARENPVVKAAKIIKV

SEQ ID NO: 29540 - protein, 477 aa, Arabidopsis thaliana
MTMSENSRNLEAGLLLRKNQNDINECRITAVVLFSTFVSVCGSFCFGCAAGYSSVAQTGIINDLGLSVAQYSMFGSIMTFGGMIGAIFSGKVADLMGRKGTMWFAQIFCIFGWVAVALAKDSMWLDIGRLSTGFAVGLLSYVIPVYIAEITPKHVRGAFVFANQLMQSCGLSLFYVIGNFVHWRNLALIGLIPCALQVVTLFFIPESPRLLGKWGHEKECRASLQSLRGDDADISEEANTIKETMILFDEGPKSRVMDLFQRRYAPSVVIGVGLMLLQQLSGSSGLMYYVGSVFDKGGFPSSIGSMILAVIMIPKALLGLILVEKMGRRPLLLMNDLYLQASTGGMCFFSLLLSFSFCFRSYGMLDELTPIFTCIGVVGFISSFAVGMGGLPWIIMSEIFPMNVKVSAGTLVTLANWSFGWIVAFAYNFMLEWNASGTFLIFFTICGAGIVFIYAMVPETKGRTLEDIQASLTDFLQ

SEQ ID NO: 29541 - protein, 492 aa, Mycobacterium avium subsp. paratuberculosis K-10
MTATISTPQYLLDQARRRFTPTLNTIPGMGAIEKRLLAHEWQTKVLAEPPAGSGLKPVLGDAGLPILGHIIELFRGGPDYALFLYRNHGPLIYLDSPIMPAVTALGPDATQAVFSNRNKDYSQKGWHPVIGPFFNRGLMMLDFDEHMYHRRIMQEAFTRSRLTGYVEHIDRVATAIVADWPTNDARFLFHPAMKELTLDIASLVFMGHEPGTDHDLVTTVNQAFTTTTRAGGAIIRQPIPPFKWWRGLRARQLLEDYFSERVKERRNATGNDMLTVLCHTEDDDGNSFTDDDIVNHMIFLMMAAHDTSTSTTTTMVYNMAAHPEWQERAREESARLGDGPLDIEALEKLETLELIMNESLRMVTPLPFNMRQAVRDTELLGHYIPAGTNITIWPGMNHRLPELWTDPDKFDPERFAEPRAEHKKHRYAFAPFGGGAHKCIGMVFGQLEVKTVVHRLLRRYRLELARPGYQPRWDYGGMPIPMDGMPIVLRPL

SEQ ID NO: 29542 - protein, 273 aa, Staphylococcus aureus
GTPYKESDIEPYYTDIRHGKRPSEEELQDLKDRYEFIGGLSPLAGTTDDQADALVSALNKAYADVEFKLYLGLKHISPFIEDAVEQMHNDGITEAITVVLAPHYSSFSVGSYDKRADEEAAKYGIQLTHVKHYYEQPKFIEYWTNKVNETLAQIREEEHKDTVLVVSAHSLPKGLIEKNNDPYPQELEHTALLIKEQSNIEHIAIGWQSEGNTGTPWLGPDVQDLTRDLYEKHQYKNFIYTPVGFVCEHLEVLYDNDYECKVVCDDIGANYYR

SEQ ID NO: 29543 - protein, 642 aa, Gibberella zeae PH-1
MRKSLPSSQNIEPPTYSIDSSPSLQFVSSLLRLTRLRGLMKERNVQVYIIPSEDSHSSEYIAECDARRAYISGFTGSAGCAVVTLESAALATDGRYFNQAASQLDDNWTLLKQGLQDVPTWQDWSAEQSSGGKNVGVDPTLISGSTAKGLAEKIRKNGGAELVAVDGNLVDLVWGDERPARPSEKVIIQPDELAGESVLNKLNKVRQEMGKKHSPGFLVSMLDEIAWLFNLRGSDIPYNPVFFAYATVTPDAAKLYIDDSKLDDECRSHLTSNKVEIKPYDTVFEDSQALHASVSEKTKTDDKAPKGNFLISNKGSWALKRAIGGDSSVDEIRSLIGDAKAIKTEAELKGMRDCHVRDGASLIQYFAWLEDQLVNKKATLDEVQAADKLEALRKEKKDFVGLSFPTISSTGANAAIIHYGPERGNCATIDPKAIYLCDSGAQYRDGTTDTTRTLHFGTPTDAEREAYTLVLKGHISLDQAIFPKGTTGFALDGLARQHLWKNGLDYRHGTGHGVGSFLNVHEGPIGIGTRVQYAEVALAPGNVLSNEPGYYEDGKYGIRIENMVLVKEVKTKHSFGDKPFLGFEYVTMVPYCRNLIDTTLLTSVEKDWLNTYNEKVIEKTQGYFEGDDVTTAWLKRETVRID

SEQ ID NO: 29544 - protein, 493 aa, Corynebacterium glutamicum
MTVTTPTTYSAIVADQLYIGGWREGTSERIATTTNPFNDETIATIRQASPDDVDAAYEIAKESQAVWAALAPKERVHILTKAADWIEENQEAVIELIRVESGSTAIKATIETSLAVGSLREAATFPTRITGQILPSNTPGKANYVFREALGVVGVISPWNFPFALSMRSVAPALACGNAVVVKPASDTPLTGGLLLGKIFEAAGLPEGVLNIVVGSGSEIGDHFVEHPIPRLISFTGSTPVGKQVGATATGGKHIKKVALELGGNAPLVVLEDADLDQAVGAAAMGKFLHQGQICMAVNRIIVQAPLYDEFVEAFAKRVQTLAYGDQCDDATVVGPVINDSQLHSVTKKIERARIEGAREVVSGPIEGRVIAPHVFADVTPAMELFREEIFGPVVGIIKAKDEAHALELANDTEFGLSSAVYTRDLARGLNFARQVEAGMTHVNDITVNDEAHVMFGGEKNSGLGRFNGEWAIEEFTTTHWVGVAPGQAQFPF

SEQ ID NO: 29545 - protein, 463 aa, Yersinia pestis biovar Medievalis str. 91001
MAHDATVAVGTNQTGTNNRVQLRKTLTLVQVVMMGLAYLQPMTIFDTFGIVSGLTDGHVATSYAIALIAVLFTAVSYGKLVKRFPSAGSAYTYAQKSISPNVGFMVGWSSLLDYLFMPMINILLAKIYLEAIFPGVPSWIFVGALVSLMTLFNLRGINIVANLNSVIVVVQVAIMVVFMGLLIHGVYQGEGAGTLVSARPFYSENAHLVPMITGATILCFSFLGFDGISSLSEETPNAGKVIPKAIFLTALIGGIIFIAVSYCLQLYFPDISRFTDPEASQPEIMLFVAGKFFQSVILCFSCVTVLASGMAAHAGVSRLLYVMGRDGVFPEKVFGYVHPKWRTPAINVLLVGGVALSAISFDLVTATALINFGALVAFTFVNLSVIAQFYVRERRNSTFKDHFNYLILPMIGAGTVGVLWVNLESSSMTLGLVWGAIGLSYMVWKTRAFRRALPQFTEEPAQL

SEQ ID NO: 29546 - protein, 590 aa, Desulfovibrio vulgaris subsp. vulgaris str. Hildenborough
MSNIKEIQQIKSLIAKGKVSGFLTFDEVNKALPAEVNTPEQIEEIIGIFDQLDIAIVDSEKDGKKISMSPGESEEEAPSEGGLDLSDDEETVDYSSRSTDPVRMYLREMGSVPLLDRDGEVVIAKKIEMGEQDVLYALVEVPVAVEELVNVGEDLKQNRIKLKDVVKTIEEDDPSEDEMNQRQRVILLLEEIRTTFKKKRKVYSKLDECCTLERRVASVQREIMNYKEDIVSRLRDIKLEKTLIDRIIETVEDYVRQMHNCQRDLSAYILSTGKTQAEIQALFSGLEAREVSPVAASAALNMTVEELFSFKEMILGKIEILSRLQDKCCHNVNDLEEVLWRIKRGNSIAMRAKQELIRSNLRLVVSIAKKYTNRGLQFLDLIQEGNIGLMKAVDKFEYQRGYKFSTYATWWIRQAITRAIADQARTIRIPVHMIETINKLIRTSRYLVQELGRDPTPEEIAERMDYPIDKVKKVLKIAKEPISLETPIGDEEDSSLGDFIEDKKAVAPAEEVVNTKLGEQIASVLADLTPREEQVLRKRFGIGEKSDHTLEEVGKLFNVTRERIRQIEAKALRKLRHPVRSQTLRSYYES

SEQ ID NO: 29547 - protein, 283 aa, Solanum tuberosum
FRTLQRFTSATLEHGMYPPFPPKPEWRALLDEISVVATEKYRSIVFKEPRFVEYFRLATPELEYGRMNIGSRPSKRKPSGGIETLRAIPWIFAWTQTRFHLPVWLGFGAAFKYALNKDKKNLNMLQDMHKKWPFFRVTADLIEMVFAKGDPGIAALYDKLLVSEDLWSFGELLRSDYEETKSLLLQVAGHKELLEGDPCLKQRLRLRDSYITTLNVCQAYTLKRIRDPTYNVTLRPHITKEYIESKPAAELVCLNPESEYAPGLEDTLILTMKGIAAGMQNTG

SEQ ID NO: 29548 - protein, 415 aa, Neorickettsia sennetsu str. Miyayama
MSKRVVVTGLGLLTCLSSTRERSWALILESRSGVRALSTIETEGLPVTIGGEVLENGEDGFDCKKFSDPRKHDRYISYGIAASREAVQHSQLLEYPSLDKRRVGVSIGSGIGGLPLIEKNSILLREEGIRKVSPFFIPASLINLTSGNVAIENGFTGPNDALVTACATGAHAIVNSWRIIANDEADVMIAGASEGALCRVGIAGFANMKALSRRNDEPEKASRPWDVDRDGFVMSDGAGVMVLEEYGHAKRRGARIYAELVGFGVSGDAYHVAAPNPNGDGALAAMASAIKMAGIGLDEIDYINAHGTSTPNGDAAELNALRRLFGSSLGMGVSSTKSSIGHALGAAGGIEAVLCVLAMRDSVMPPTLNLDKPDDCASGFNLVPHTSQEKNLRYVLSNSFGFGGTNVSLLFGQYS

SEQ ID NO: 29549 - protein, 549 aa, Brucella suis 1330
MARDATKLEATVAKLKKHWAESAPRDMRAAFSADPGRFGRYSLCLDDLLFDWSKCRVNDETMALLKELAVAADVEGRRAAMFAGEHINNTEDRAVLHVALRDTSSKEVLVDGHNVLPDVKHVLDRMAAFADGIRSGALKGATGRKITDIVNIGIGGSDLGPVMATLALAPYHDGPRAHFVSNIDGAHIADTLSPLDPASTLIIVASKTFTTIETMTNAQTARKWVADTLGEAAVGAHFAAVSTALDKVAAFGIPEDRVFGFWDWVGGRYSVWSAIGLPVMIAVGPDNFRKFLAGAHAMDVHFRDAPLEKNLPVMLGLIGYWHRAICGYGSRAIIPYDQRLSRLPAYLQQLDMESNGKSVTLDGKPVSGPTGPVVWGEPGTNGQHAFFQLLHQGTDTIPLEFIVAAKGHEPTLDHQHEMLMANCLAQSEALMKGRTLDEARAQLQAKNLPASQVERIAPHRVFSGNRPSLTLIHDMLDPYALGRLIALYEHRVFVEAQIFGINAFDQWGVELGKELATELLPVVSGKEGASGRDASTQGLVAHLHARRKA

SEQ ID NO: 29550 - protein, 424 aa, Bradyrhizobium sp. BTAi1
MSVRDKFGRPIVVVTGMGIVTSLGAGKAENWSKLVAGESGIRTITRFPIDGLKTTMAGTVDFVPVAPFTSTGLSERLGHMAVEEAIAQSGIGTKGDFPGPLFLAVAPVEIEWPQRLELAHEVGGTQFTYDDLLRVCGGGKFVNYHHRFLFGSVADSLSDTFGTKGSPISLSTACASGATAIQLGVEAIRRGETDVALCAATEGSVNPEGLVRFSLLSALSTQNDPPQAASKPFSKNRDGFVMAEGAGALVLESYDAAVARGAKILGVVAGCGELTDSFHRTRSSPDGKPIIGCIRKALADAGMAPEQIDHINAHGTATPENDKMEYVGVSAVFGDYTSRIPVSSNKSMVGHTISAAGAVEAIFSLLTLEHQRIPPTINFDVPDPAILFDVVGNKARDARVTTVMSNSFGFGGQNASLILTREPA

SEQ ID NO: 29551 - protein, 325 aa, Photorhabdus luminescens subsp. laumondii TTO1
MNNGKFGVLLVNLGTPDKPTTAAIRRYLAEFLSDKRVIDLSRFIWKPILYGFVLPFRSSRVAKLYQKIWTDEGSPLLVYGRRQQKLLAERLAGIPVELGMNYGSPSLEQAIDNLLKQNVEQLIVLPLYPQYSGSSSAAVFDGVSLVLQKYRTIPGMHFIRSYADHPAYISALKETIEQSFDKHGQPDRLLLSYHGIPQRFVDTGDIYAEQCKLTTRLLKQAINYPTEQVMMAYQSRFGREQWLTPYVDQTMKTLPNQGIKHIQVLCPGFSSDCLETLEEIKQLNKEMFLNAGGEKFEYIPALNDNASHILLLEELVNGFVRNRDE

SEQ ID NO: 29552 - protein, 232 aa, Chlorobium tepidum TLS
MSSPSFNVEEHKKMLQSYFNGQGFQRWASIYGDDKLSTVRSTVRQGHAVMMDKAFEWLQKTGLPKGSKILDAGCGTGLFTIRLAKSGYRVKAADIAEQMVNKTREDAEKAGVAGNVEFEVNSIESVSGTFDAVVCFDVLIHYPAEGFAHAFSNLAGLTKGPIIFTYAPFNNILAFQHWIGGFFPKKERRTTIQMIKDKEMQRVLSELGLKIVSQQKISFGFYHTMLMHVARR

SEQ ID NO: 29553 - protein, 450 aa, Vibrio fischeri ES114
MNPINVAKFGGTSVANFEAMTKSASVIEQNPNTHLVVISACSGVTNLLVELANGVQDNHRKKAILEGLKTIHFSVLDQLADPLIPEQAILDILDDIEKTAETAASQSNDKLTDHLVSCGELMSTHLFTQLLIERGNPAVRFDIRTVLRTDSRFGKGEPQLNDISRLAQKKLTPLCQQQIVVTQGFIGSDSEGNTTTLGRGGSDYSAALIAESVDACGLEIWTDVPGIYTTDPRIAPKASPIPEISFSEASEMANYGAKILHPSTLLPALRHQIPVFVGSSKEPEKGGTWIKEKVDSTPLFRALTLRCNQTMVTLHSPSMFHAYGFLAEVFKILAKYQISVDLITTSEVSVALTLDQTNTNGKAPELPLEAQQELEELCTVEVEHNLCLIALIGNKMSHSKGSAKQVFGTLEEFNLRMICYGASQHNLCFLLHESESKQAVKILHKELFEQ

SEQ ID NO: 29554 - protein, 587 aa, Medicago truncatula
MDFDEYEYLEKTVEELEDKDSKKNESSDKTERSYRKRDEIEDGTEEKRSKRRSSGDGDDERVSKKDRDRDDDRDKERHRSGRDRDRDRDRDGERSSRDRDRDREKDRDREKDRREKEKERERREREREKERERERSRRSKSRSERDREIEREERERSRRSISRSERDREREREERDRSRRSRSRSERDFEMRDSRRFREKKETVEPEADPERDQRTVFAYQMPLKATERDVYEFFSKAGKVRDVRLIMDRNSRRSKGVGYIEFYDAMSVPMAIALSGQLLLGQPVMVKPSEAEKNLVQSNTTTGAAGVVGPYGAVDRKLYVGNLHFNMTESQLREIFEPFGTVEVVQLPLDLETGHCKGFGFIQFAHIEHAKAAQSLNGKLEIAGRTIKVSSVADHIGSQDTTTKSADFDDDEGGLALNAQSRALLMQKLDRSGITASIGLPMNGLAPAQPAISLPIGNTGLIHPGLIPAPGLALPTQIMPTQVAEPVGTPSNCLLLKNMFDPTTETEPDFDLDIKEDVEEECSKYGRVKHIYVDKNSAGFVYLMFETVEAASAAQRAMHMRWFARKMISAIYMQPHEYEAKFKGEL

SEQ ID NO: 29555 - protein, 187 aa, Triticum aestivum
  misc_feature (61)..(61): Xaa can be any naturally occurring amino acid
  misc_feature (170)..(170): Xaa can be any naturally occurring amino acid
FSVVAAEVGAGHSNSLLQNPNHPQLLERALEASGDDLDFAIRSLNDLRLESAEGYLFSCSXTEPENALSTALKLSAEGNGQLDAISGNPPATDNCQTNHHSSEWVELFVREMMSASDINDARAPASRALEVIEKSIMERTGAEAVQNLHKENKMLKEQLAIALRENAVLXKRGVAFQHGRARTEFDD

SEQ ID NO: 29556 - protein, 494 aa, Xanthobacter autotrophicus Py2
MAAVQDTVEQVRSIDVDQYKYGFETLIESEKAPKGLSEEVIRYISAKKEEPEWMLQWRLDAYARWLTMPEPEWARVDYPTIDYQDLYYYSQPKQFKAPKSLDEVDPEILKTYAKLGIPLREQEILAGVEIPEGERPKIAVDAVFDSVSVATTFKEELKAAGVIFMPISEALREHPDMVKQYLGSVVPPTDNYFATLNQAVFSDGSFVYIPPGVRCPMELSTYFRINEKNTGQFERTLIIADKGSYVSYLEGCTAPMRDENQLHAAVVELVVLDDAEIKYSTVQNWYPGDADGKGGIYNFVTKRGDCRGKNSKISWTQVETGSAITWKYPSCVLRGEGSSGEFYSIAISNGRQQVDSGTKMIHLGKNTTSRIISKGISAGRSNNTYRGLVSAHRKAAGARNFTNCDSLLIGDNCGAHTVPYIEAKNPTAQFEHEATTSKISEDMLFYCMQRGLTQEDAVALVVNGFVRDVLQQLPMEFAVEAQKLISISLEGSVG

SEQ ID NO: 29557 - protein, 272 aa, Shigella dysenteriae
LMASHPGLVVELVPMVTRGDVILDTPLAKVGGKGLFVKELEVALLENRADIAVHSMKDVPVEFPQGLGLVTICEREDPRDAFVSNNYDSLDALPAGSIVGTSSLRRQCQLAERRPDLIIRSLRGNVGTRLSKLDNGEYDAIILAVAGLKRLGLESRIRAALPPDISLPAVGQGAVGIECRLDDARTRELLAALNHHETALRVTAERAMNTRLEGGCQVPIGSYAELIDGEIWLRALVGAPDGSQIIRGERRGAPQDAEQMGISLAEELLNNG

SEQ ID NO: 29558 - protein, 870 aa, Salinibacter ruber DSM 13855
MMPASGRPWVVCKFGGTSVSSRARWDTIVEVVRTHRAEGRAPFLVCSALQGISDQLEALCAQLASAEPGAPESTLNTIRERHRALGQDLGVEAEAVLSGEFARLERWVDEIQATDGPSPRQRAAVLATGELLSTRLGAAYLSAQGLPAEWLDAREFLRATDDPHLPPRRQYLAANCTSHADPGLQARLADAPETVYLTQGFIASNALDETVLLGRGGSDTSAAHFAAKLEAERTEVWTDVPGLFTANPGEVPSGRLLRRLDYDEAQELATMGARVLHPRCLDPARRHQIPLHVRSTEAPSLDGTIVSGEGPDVGPQVKAISAKTDITAVSMDTLGMWQEVGFLADVFQVFKHHGLSVDLMATSESNVTVTLDPVANALDPDILDRLLHDLNRYCDAELIDPCAIVSLVGRHIRSLLSELGPAFEVFDEQKVHLVTQAASDLNMSFVVDEDQASRLVRELHAQFFGHRAPDAVFGPRWQELVEDGTPEETPDVWWRERREALLRLADDESPRYVYDPEVVTARSDEVQGLGPIDQSFYAVKANPHPEVLRLLERRGLGFECVSPGELDRVFEACPGLDPARVLFQPNFAAPAEYADAFERGVHVTVDNVQPLAEHPDVFAGEELFVRVDPGQGEGHHRKVRTAGAQSKFGVVPDDLGRLRAAVDQAGATVVGLHAHVGSGITDESTWAGLVDLLASLAAEFPAVRALNVGGGLGVPNASGGRPLDLDALDAALGKAAARHPQYDLWMEPGRYLVAEAGVLLARVTQTKTKDAAAYVGLDTGMNSLLRPALYGAHHEIVNLSRLDEPPAMTADVVGPVCETGDVLGHDRRLPPTEPGDTLLVATTGAYGASMSNRYNLREPASEVMLAPEPA

SEQ ID NO: 29559 - protein, 364 aa, Glycine max
TSSIIIDFIVPSKQTLQRFVSFHLRRTMSEAPPPPTADASPPPYWCYHCEKRVSVETLANLPDVVRGECKNGFVESMPTPSRSRSPSASSDDPYFGSQFLQVLRLIAQSARDDDASPPPPPSRSPENDFLRIELGGWDNDEENENDDDNGDEEFEEHEEAEDRSGNEDPHGGDDEDLRRRRRELLRLRIRDLATRTRSMRNRILDWAEILMGLEDNSIEFRLQLPESDRYVGNPEDYVDAAEYEALLQTLAESDGGGRRGAPPASKAALEALPTVKIASESEAVACAICKDLLGVGDAAKRLPCGHRYHGDCIVLWLSSRNSCPVCRFELPTDDKEYEEERVVIAASSNSNGASSSGGGGSAIV

SEQ ID NO: 29560 - protein, 290 aa, Xylella fastidiosa Ann-1
MSVLVNKNTKVIVQGFTGQQGTFHATQMVEYGTQVVGGVTPGKGGNTHIDLPVFNTVCEAVQNTGADASVIYVPPPFAADAILEAAAAGIKVIVAITEGIPVLDMLRVKNVLKASPEITLIGPNCPGVITPGECKIGIMPGHIHKPGHIGIVSRSGTLTYEAVKQTTDVGLGQSTCIGIGGDPINGLNFVDALKLFNNDPQTKGIIMVGEIGGDAEEAGAEYIKHHVKKPVVGFIAGASAPKGKRMGHAGAIASGGSGTAEGKFAAMEKAGIKTVRSPGDLGAAIASLVR

SEQ ID NO: 29561 - protein, 295 aa, Ehrlichia ruminantium str. Gardel
MSILVNSNTKVICQGFTGAHGTFHSEQAIAYGTKMVGGVTPGKGGTYHLNLPVFNTVKQAKLQVGANATVIYVPAPYAADAILEAIEAEIELIICITEGIPTLDMVQVKRALCNSKSILIGPNCPGIITPEECKIGIMPGYIHKRGHIGVISRSGTLTYEAVAQTTEAGLGQSTCIGIGGDPIHGMSFTDCLKLFINDPDTHGIIMIGEIGGSEEEEAAEFIKLSGTTKPIVGFVAGKTAPPGRRMGHAGAISSGSSGSAESKIQIMKSAGIIIAETPAVIGKTMFEAMSNITKN

SEQ ID NO: 29562 - protein, 224 aa, Oryza sativa
MASSSLFLLGALLVLASWQAIVAYDPSPLQDFCVADMNSPVRVNGFACKNPMDVSSEDFFNAAKFDMPRNTFNKLGSNVTNLNVMEFPGLNTLGISLARIDYAPMGVNPPHIHPRATELLTVLEGTLYVGFVTSNPNKLFSKVVCKGDVFVFPKAMIHFQMNLDHDKPAVAQSALSSQNPGVITIASAVFGSQPPISDDVLTKAFQVEKKLIDWLQSQFWENNY

SEQ ID NO: 29563 - protein, 476 aa, Glycine max
LETAVLLALIGANSTVVAAGLLHDSLDDAFLTYDYIVGMFGAGVADLVEGVSKLSHLSKLARENNTASKSVEADRLHTMFLGMADARAVLVKLADRLHNMMTLDALPGAKQQRFAKETLEIFAPLANRLGISTWKEQLENLCFKHLNPSQHEELSSKLVESYDDAMITSAIERLEQALKDEGISYNVISGRHKSLYSIYCKMLKKKLTIDDIHDIYGLRLIVDKEEDCYKALTVVHRLWSEVPGKLKDYICRPKFNGYQSLHTVVMGEGKVPLEVQIRTKDMHLQADFGFAAHWRYKEDDCQHSSFVLQMVEWARWVVTWQCEAMSRDCSSVGYADSVKPPCKFPSHAEDCPYSYKPDCGQNGPVFVIMIENDKMSVQEFSANSTVLDLLKRSGRASSRLTTYRFPLKEELRPRLNHKPVSDPNSKLKMGDVIELTPAIPDKSLTEYREEIQRMYDRGLTVSSMGTAASTMVGSRS

SEQ ID NO: 29564 - protein, 135 aa, Escherichia coli CFT073
MRLLHTMLRVGDLQRSIDFYTNVLGMKLLRTSENPEYKYSLAFVGYGPETEEAVIELTYNWGVDKYELGTAYGHIALSVDNAAEACEKIRQNGGNVTREAGPVKGGTTVIAFVEDPDGYKIELIEEKDAGRGLGN

SEQ ID NO: 29565 - protein, 140 aa, Pseudoalteromonas tunicata D2
MIIACPQCNGLNRVPDEKLTEQPKCGKCKTLLLSGQVLELTSDNFIVHSQKSELPLVVDFWASWCGPCQQFAPIFNQVASRKHTQFRFGKINTEQQQTLAAQFNIRSIPTLKIIKQGKIVAEQAGALPQSAFEQWLNAHQ

SEQ ID NO: 29566 - protein, 273 aa, Staphylococcus aureus
GTPYKESDIEPYYTDIRHGKRPSEEELQDLKDRYEFIGGLSPLAGTTDDQADALVSALNKAYADVEFKLYLGLKHISPFIEDTVEQMHNDGITEAITVVLAPHYSSFSVGSYDKRADEEAAKYGIQLTHVKHYYEQPKFIEYWTNKVNETLAQIPEEEHKDTVLVVSAHSLPKGLIEKNNDPYPQELEHTALLIKEQSNIEHIAIGWQSEGNTGTPWLGPDVQDLTRDLYEKHQYKNFIYTPVGFVCEHLEVLYDNDYECKVVCDDIGANYYR

SEQ ID NO: 29567 - protein, 639 aa, Thiobacillus denitrificans ATCC 25259
MCGITGIFDTSGVNAISRDLLQRMNETQHHRGPDEGGLHLEPGLGLGHRRLSIIDLSSGQQPLANEDGSVVVVFNGEIYNFQELVPELEALGHVFRTHSDTEVIVHAWEAWGEACVARFRGMFAFVLWDRNQETLFVVRDRFGVKPLYYAFLDTGEFIFGSELKSLMVHPSLGREVDPLAVEDYFAYGYVPEPRTIFKRVHKLPPGFTLTLKRGAPRALPKQYWDMPFAPVAVKDEAGAMDELVERMKESIRLRMIADVPLGAFLSGGVDSSAVVAMMATQSSTPVNTCSIGFDDPAFNEIEYAQQVADRYHTRHHVETVAADDFSLVGKLAQVYDEPYADSSALPTYRVCELARKHVKVALSGDGGDEHFAGYRRYRWFRYEERMRSIIPLGLRRPLFGTLGLLYPKADWAPKMFRAKTTFEALARDTVEGYFHGVSLLSNAQRAQLFSPAFRRELQGYQAVDVLRRHAAVAPTDDPLSLVQYLDMKTYLVGDILTKVDRASMAHALEVREPLLDHELMGWVSGLPVDLKLRGSEGKYLLKKAMEPYLPHDVLYRKKMGFSVPLAAWFRGPLAATIRTVVLGERLAGTGMFNCEFLREVVEAHQSGRRDFSVILWTVLMFDAFLGQVLGLDDTAREAA

SEQ ID NO: 29568 - protein, 82 aa, Arabidopsis thaliana
  misc_feature (70)..(70): Xaa can be any naturally occurring amino acid
KSSAAFPVTRKTNKDITSIASNGGRSSCMKVWPPIGKKKVETLSYLPDLSDVELLKKVTTFSANRWIPCXEIRVKARIVYRE

SEQ ID NO: 29569 - protein, 169 aa, Brassica napus
MKMGMGLVVLTVFMAVMSSTRVLAQSTCTSALISMSPCLNYITGNATSPSQQCCSQLGNVVRSSPDCLCQVLNGGGSQLGINVNQTQALALPRACNVQTPPVSRCNNGGGSTADSPADSPNSSGPGNGSKTVPVGEGEGPSSDGSSIKFSYPLLAFLSVASYMAILMKY

SEQ ID NO: 29570 - protein, 295 aa, Aspergillus nidulans FGSC A4
MSHEVSTQPRDLPILATTESTAGKTYIVTGANTGLGFEAAKHFVRLGAKRVILAVRSIPSGEAAKQKIDEATATTDVAEVWALDLSSYASVKTFAKRAITELDRIDAVIENAAVATAEQTRAEGHGLSLTVNVLSTFLLAVLLLPKLKESAEKYGVLPHLSIVTSGVGWDVRETWEKIREDPLVRMDELPSEQLMVTYPLSKLMDTLAVRELAARLPVEQGKVVINSICPGLCKTELVRNCPPAQKQAIVEQHELYGRTAEDGSRTLLAGSVLGKESHGAYTSNCEIRECVAPNL

SEQ ID NO: 29571 - protein, 476 aa, Bacillus cereus G9241
MAKEQVQAITKMEEDFAQWYTDIVKKAELVDYSSVKGCMILRPYGYALWENMQKVMDEKLKATGHENVYMPMFIPESLLQKEKDHVEGFAPEVAWVTHGGDEKLAERLCIRPTSETLFCEHFSKIVQSYNDLPKLYNQWCSVVRWEKTTRPFLRTTEFLWQEGHTIHETAEESQAETLNILNLYASFCEDYLAIPVIKGQKTEKEKFAGAKATYTIESLMHDGKALQTGTSHNFGTNFSEAFDIKFLDRNGKWQYVHQTSWGVSTRMIGGLIMVHSDNNGLVMPPKVAPVQVVIVPIAQHKEGVLAKATELQGHIQKVARVKIDASNKTPGWKFNEYEMKGIPIRLEVGPKDIEKNQVVLVRRDTKEKEFIAMDQLEERIPALLEEIHNSLFNKAKVFRDENTYSVTKFEEMKKVADEKQGFIKAMWCGELACEEKLKEEVGVSSRCMPFEQEHLADECICCGKEAKQMVYWGKAY

SEQ ID NO: 29572 - protein, 273 aa, Staphylococcus aureus
GTPYKESDIEPYYTDIRHGKRPSEEELQDLKDRYEFIGGLSPLSGTTDDQADALVSALNKAYADVEFKLYLGLKHISPFIEDAVEQMHNDGITEAITVVLAPHYSSFSVGSYDKRADEEAAKYGIQLTHVKHYYEQPKFIEYWTNKVNETLAQIPEEEHKDTVLVVSAHSLPKGLIEKNNDPYPQELEHTALLIKEQSNIEHIAIGWQSEGNTGTPWLGPDVQDLTRDLYEKHQYKNFIYTPVGFVCEHLEVLYDNDYECKVVCDDIGANYYR

SEQ ID NO: 29573 - protein, 379 aa, Trachelomonas volvocina
  misc_feature (131)..(131): Xaa can be any naturally occurring amino acid
IGHVDHGKTTLTAAITMALAASGNSKAKRYEDIDSAPEEKARGITINTAHVEYETKNRHYAHVDCPGHADYVKNMITGAAQMDGAILVVSGADGPMPQTKEHILLAKQVGVPNIVVFLNKEDQVDDKELLXLFELEVRETLSNYEFPGDEIPVVSGSALLSVEALTQNPKIARGENKWVDKILELMDKVDSYIPTPKRDTDKDFLMAVEDVFSITGRGTVATGRVERGTIKVGETVELVGLKNTKSTTVTGLEMFQKSLDEAMAGDNVGILLRGIQKADIERGMVLSKPGTINPHTKFDSQVYILTKEEGGRHTPFFEGYRPQFYVRTTDVTGKIESFRSDNDTTAQMVMPGDRIKMQVELIQPIAIEKGMRFAIREGG

SEQ ID NO: 29574 - protein, 224 aa, Triticum aestivum
  misc_feature (198)..(198): Xaa can be any naturally occurring amino acid
MRPTGASIAIQAPNCGKANRGLFVIRHLRKGDVLQAIKVGNRQGFPSHDVVNGRPVNCNTTHYRANWARRRMLPAAMADLACSRPRCKSSLSPSPAEFNTITTANSIGMARGAAIPLVLVAMVATMLLVATDAAISCGQVTSALSPCISYARGNGANPTAACCSGVRSLAGAARSTADKQAACKCIKSAAGGLNAGKXAAGIPSKCGVSVPYAISANVDCSKIR

SEQ ID NO: 29575 - protein, 125 aa, Glycine max
MGKSVVEKLLWMAIVCLVLGVISITPKAQAAVTCNQVVSNLTPCISYVLNGGKTVPGPCCNGIKTLFNLAHSTPDRQTVCKCIKNAVSAFHYGKSNVDRAAALPKQCGVNIPYQISPSTDCTRVQ

SEQ ID NO: 29576 - protein, 212 aa, Bacillus clausii KSM-K16
MGNIEKNQAPEVLPDDWVKRAKKLSTTLISDGMDIPVEMNHLIKPFNIDRVLVGSAVTIEVEDGDNLAVHHAIYHSRPGHVLVVSANGNEKRAVIGELMVAAADALQLNGFIIDGLIRDVQTLSTSSFPVFGRGAIPAGPTKNGPGVINQPINCGGLKVEPGDFVMGDADGVIVLPRANVENALQLAEEKAKYEKARLESIANGNIKPKWLE

SEQ ID NO: 29577 - protein, 432 aa, Thermotoga maritima
LFKPNYHFFPITGWMNDPNGLIFWKGKYHMFYQYNPRKPEWGNICWGHAVSDDLVHWRHLPVALYPDDETHGVFSGSAVEKDGKMFLVYTYYRDPTHNKGEKETQCVVMSENGLDFVKYDGNPVISKPPEEGTHAFRDPKVNRSNGEWRMVLGSGKDEKIGRVLLYTSDDLFHWKYEGAIFEDETTKEIDCPDLVRIGEKDILIYSITSTNSVLFSMGELKEGKLNVEKRGLLDHGTDFYAAQTFFGTDRVVVIGWLQSWLRTGLYPTKREGWNGVMSLPRELYVENNELKVKPVDELLALRKRKVFETAKSGTFLLDVKENSYEIVCEFSGEIELRMGNESEEVVITKSRDELIVDTTRSGVSGGEVRKSTVEDEATNRIRAFLDSCSVEFFFNDSIAFSFRIHPENVYNILSVKSNQVKLEVFELENIWL

SEQ ID NO: 29578 - protein, 257 aa, Mycobacterium tuberculosis CDC1551
MTYETILVERDQRVGIITLNRPQALNALNSQVMNEVTSAATELDDDPDIGAIIITGSAKAFAAGADIKEMADLTFADAFTADFFATWGKLAAVRTPTIAAVAGYALGGGCELAMMCDVLIAADTAKFGQPEIKLGVLPGMGGSQRLTRAIGKAKAMDLILTGRTMDAAEAERSGLVSRVVPADDLLTEARATATTISQMSASAARMAKEAVNRAFESSLSEGLLYERRLFHSAFATEDQSEGMAAFIEKRAPQFTHR

SEQ ID NO: 29579 - protein, 117 aa, Arabidopsis thaliana
  misc_feature (37)..(37): Xaa can be any naturally occurring amino acid
  misc_feature (68)..(68): Xaa can be any naturally occurring amino acid
  misc_feature (73)..(73): Xaa can be any naturally occurring amino acid
  misc_feature (78)..(78): Xaa can be any naturally occurring amino acid
MASSMLSSTAVVTSPAQATMVAPFTGLKSSASFPVTXKANNDITSITSNGGRVSCMKVWPPIGKKKFXTLSYXPDLSXVEFGKEVDYLFRNKWVSLKFVWTGFFTGRENNPGNFLGR

SEQ ID NO: 29580 - protein, 471 aa, Geobacillus kaustophilus HTA426
MNLFRKKPIQLLMKESGAKGASLRKELGAFDLTMLGIGAIIGTGIFVLTGVAAAEHAGPALVLSFILSGLACVFAALCYAEFASTVPVSGSAYTYSYATFGELIAWILGWDLILEYGVASSAVAVGWSGYFQGLLSGFGIELPKALTSAYDPAKGTFIDLPAIIIVLFITFLLNLGAKKSARFNAVIVAIKVAVVLLFLAVGVWYVKPENWTPFMPYGFSGVATGAATVFFAYIGFDAVSTAAEEVRNPQRDMPIGIIVSLLVCTLLYIAVSLVLTGIVPYEQLNVKNPVAFALNYIHQDWVAGFISLGAIAGITTVLLVMMYGQTRLFYAISRDGLLPKVFARISPTRQVPYVNTWLTGAAVAVFAGIIPLNKLAELTNIGTLFAFITVSIGVLVLRKTQPDLKRAFRVPFVPVVPILAVLFCGYLVLQLPAMTWIGFVSWLLIGLVIYFIYGRKHSELNEMARTEEKAG

SEQ ID NO: 29581 - protein, 112 aa, Xanthomonas campestris pv. vesicatoria str. 85-10
MKMIMAIVKPFKLDDVREALAGCGVAGITVTEVKGFGRQKGHTELYRGAEYVVDFLPKVKIEVAVTDDQAERVVEAIVAAAGTGKIGDGKVFVYDLGTVVRIRTGELDSDAL

SEQ ID NO: 29582 - protein, 729 aa, Bradyrhizobium sp. BTAi1
MLRVLSKSMPLFGRLDRAVDALVRLIGHFGSAVIGLSAIALVWVGIVYTITEERARTEQSALKNGANLARAFEEQIIRSIRAADQTLLYVRDSYAKDPQNFDMSLWARNSQFLSDFSFQVVVIGKDGIMLSSNIDPKMRGLDLHDREHFRVHADGTADFLFISKPIFGRVSNKWSIQLTRRIILQDGSFGGVVVVSLDPEYLSSFYNSVDIGKNGNVTLVGTDGIVRARASAGPSAVGSSLAGSPIMANIEQKTSGSYITKSQIDGISRIYSFRRVKDQPLVVVVGQATDEVFSAIRVDRGLMVGTLLTVIIGIITILIARYQAGLAASRDAAEAGTRARSEFLAMMSHEIRTPMNGVIGLADLLLSADLAPEQRKIATTLRESADYLLQLLNDVLDFSKLDADRLEIEHIEFDLHRSVTATAELLVSRAKEKGLQLTTSIAPDVPNYVVGDPARLRQVLFNLVGNALKFTEAGSVNIDVRAENLAGPNLTLVFSVADTGVGIPAEAVGRLFRQFSQVDNSISRRFGGTGLGLAICKRLVTCMGGDIKVQSKIGEGSTFTFSIEVQPQPQPDVEQLSVPEAPIVPVGESVSEERPANFEPLKVLVAEDNLTNQFVIKKLLDKLGHGYDIVDNGTQAIAAVQKHAYDLVLMDMMMPEMDGLTATRMIRSLPPPARDIYIIALTANATSQDHLACTDAGMNDFVTKPVTRDRLNAALLRATAAKHKERLVA

SEQ ID NO: 29583 - protein, 186 aa, Brassica napus
  misc_feature (42)..(42): Xaa can be any naturally occurring amino acid
LDPRVRTGAKLSRSEHSMGASSEPKSIYDFTVKDAKGNDVDXSTYKGKVLLIVNVASQCGLTSTHASELAQLYQKYKDHGFEILAFPCNQFGNQEPGSNEEIVQFACTRFKAEYPIFDKVDVNGDSAAPIYKFLKSSKGGLFGDGIKWNFAKFLVDKDGNVVDRYAPTTSPLSIEKDLKKLLGVTA

SEQ ID NO: 29584 - protein, 383 aa, Magnaporthe grisea 70-15
MLALRRVAAAAPVARQFSAAPRAAATFAFSRYYSSQGERVAKFTGKKDASGRYPVSLIEGDGIGPEISEAVKQIFEAAKAPVSWEPVDVTPILKDGRTAIPDAAIESIERNKVALKGPLATPIGKGHVSLNLTLRRTFNLFANLRPCRSVAGFKTPYDNVDTVLIRENTEGEYSGIEHVVVDGVVQSIKLITREASERVLRFAFQHAQEIGRKKVRVVHKATIMKMSDGLFLSVGQQVAKDFPGIEFDAELLDNTCLKMVTDPLPYNDKVLVMPNLYGDILSDMCAGLIGGLGLTPSGNIGDECSIFEAVHGSAPDIAGKGLANPTALLLSSMMMLRHMGLGEYADRIEKATFDTLAEGKALTGDLGGKAKTHEFAGAIISKL

SEQ ID NO: 29585 - protein, 404 aa, Exiguobacterium sibiricum 255-15
MIEVKLHDVGEGMTEGEIANYLVRVGDRVTIDQPVVEVSTDKMVAELPAPVSGVVTDLIIPVGQTVSVGTVLLLIEALETETAVTAEQPIQQTTEQIKVRPPVVTPAVPSNNRRVLATPYTRKIAREHGIDLEQVPPSDPSGRVTEEDVRRFLDADTSVEKTDVVEQTSTLSANPVETIPFRGIRKQIAKKMTQSLFTIPHVTHFEEVDMTRLLALREELKTAGKPISVNAFFIKALIFALQDFPVFNAKLDEANEQIILEQQFHIGVATETADGLIVPVVRDADKLTMQQLHTRVAELSARAKTGDLRAADLKPSTFTMSNVGPLGSTGATPIINYPETALIAFHKTKKRVCVDDHDQIVIRSMMNLSMSFDHRVADGATAVAFTNRFAGLIEHPTTLLMELI

SEQ ID NO: 29586 - protein, 272 aa, Shigella dysenteriae
LMTSHPGLVVELVPMVTRGDVILDTPLAKVGGKGLFVKELEVALLENRADIAVHSMKDVPVEFPQGLGLVTICEREDPRDAFVSNNYDSLDALPAGSIVGTSSLRRQCQLAERRPDLIIRSLRGNVGTRLSKLDNGEYDAIILAVAGLKRLGLESRIRAALPPEISLPAVGQGAVGIECRLDDARTRELLAALNHHETALRVTAERAMNTRLEGGCQVPIGSYAELIDGEIWLRALVGAPDGSQIIRGERRGAPQDAEQMGISLAEELLNNG

SEQ ID NO: 29587 - protein, 272 aa, Shigella dysenteriae
LMASHPGLVVELVPMVTRGDVILDTPLAKVGGKGLFVKELEVALLENRADIAVHSMKDVPVEFPQGLGLVTICEREDPRDAFVSNNYDSLDALPAGSIVGTSSLRRQCQLAERRPDLIIRSLRGNVGTRLSKLDNGEYDAIILAVAGLKRLGLESRIRAALPPEISLPAVGQGAVGIECRLGDARTRELLAALNHHETALRVTAERAMNTRLEGGCQVPIGSYAELIDGEIWLRALVGAPDGSQIIRGERRGAPQDAEQMGISLAEELLNNG

SEQ ID NO: 29588 - protein, 196 aa, Triticum aestivum
  misc_feature (37)..(37): Xaa can be any naturally occurring amino acid
  misc_feature (56)..(56): Xaa can be any naturally occurring amino acid
  misc_feature (160)..(160): Xaa can be any naturally occurring amino acid
  misc_feature (175)..(175): Xaa can be any naturally occurring amino acid
LLLGTIEQASTAGWYRSVPPGISSTHASAATSVAPFXGLKSTAGLPVSRRSNGASXGSVSNGGRIRCMQVWPIEGIKKFETLSYLPPLSTEALLKQVDYLIRSKWVPCLEFSKVGFIFREHHPSPGYYDGRYWTMWKLPMFGCTDATQVINQVEEVKRDXPDAYVPIIGFDNMRXCSAVTFIAFKPTGLARNPGKA

SEQ ID NO: 29589 - protein, 362 aa, Bordetella bronchiseptica RB50
MFLRLFKYLWPERYLPETPAQDPFDENPPPCGPGRVGVLLVNLGTPDEPTRGAIRRYLGEFLSDPRVIEIPRYLWMPILHGLVLAMRPKKLAPRYAGIWMEEGSPLLVYSQRQAAGVRQGLAARGVHAEVELAMRYGKPSIPAAITALRERGCDHILAVPLYPQYAASTTATVVDAVTRHAGRLRDQPALRFVKRFHNDPAYVEAQAGRIAEFWQAHGRPQKLVMSFHGLPRYSIELGDPYYRDCLDTARLLRERLGLREDEVEVTFQSRFGSARWLEPYTEPTLAELARQGVTEVDVVCPGFVADCLETLEEISQECRDAFVAAGGRQFRYIPALNDCPPWIEGLTDLVERQLRGWPTGNP

SEQ ID NO: 29590 - protein, 322 aa, Xanthomonas campestris pv. campestris str. ATCC 33913
MSASSASPAKHSRLLILGSGPAGWTAAVYAARANLKPVVITGLQQGGQLMTTTEVDNWPGDPHGLMGPDLMSRMQAHAERFDTEVIFDHIHTADLSQRPFRLIGDSAEYTCDALIIATGATAKYLGIPTEEAFKGRGVSACATCDGFFYKDQDVVVVGGGNTAVEEALYLSNIARKVYLVHRRDTLRAEKIMQDKLFAKVAAGKIETVWHHAIEEVLGNDAGVTGVRVKSTLDGSTRDIDAHGFFVAIGHHPNTQLFDGQLAMNNGYLEIRSGLNGAATETSVAGVFAAGDVADQHYRQAITSAGFGCMAALDAERYLDKSA

SEQ ID NO: 29591 - protein, 327 aa, Mycoplasma hyopneumoniae 232
MEKCSKIMLMGLGDFGSKIVESINFDQASFPKFFINSADEYTNSNFLNRQNSLIIPQSNFRYNWQKANRAILDKSLEIKLALVNVRILFLVVGLGGATGSGFSLAIANIAQKMGIIVIVIATNPLENESKIRQQTSFDVLSELKKVVDSLIIISNEQISENYSGFFLENIFKLITTNIQAKIGIILKAFCQNNALVHVNNSISESILANNNFVFVTSAIAKGENRGIIATKKALKNHFVEFDLFAAEEMLVTITADNSILQAEISDILNIIRKNFNQDLKFSYGLYQNPQLGNQVEIGIIASQKKHSYESKKAAKLNLAFDNEFNIF

SEQ ID NO: 29592 - protein, 91 aa, Guillardia theta
MGKRTLKVGIVGKYGTRYGSSIRKQIKKIEISQHRTFFCKFCGKKKIKRISIGIWNCKKCNKTFAGGAWELQTEAGFLSQNIIKKTTKNTN

SEQ ID NO: 29593 - protein, 206 aa, Cryptococcus neoformans var. neoformans JEC21
MATRKKHLLKVIILGDSGVGKTSLMNQYVNKRFSTQYKATIGADFLTRELVVDDRVVTMQLWDTAGQERFQSLGVAFYRGADCCVLVYDVNSNKSFEALDGWRDEFLVQASPHDPENFPFVVLGNKIDMEESKRMVSQKRAMTWCQAKGNIPYFETSAKEAINVEQAFQTIAKNALAQEAETELYADYPDPIRIDSESTQNYGCNC

SEQ ID NO: 29594 - protein, 507 aa, Bordetella bronchiseptica RB50
MPGRGCVPRFFSSDSIDMTISPLQLLNDPSLLRTDALVDGRWIAASRRFAVHDPATGRKLADVANLDAAHAREAIAAAQAAWPAWRARTVKERSAILRKWFDLLLANQDDLARLLTAEQGKPFGEARGEIAYAASFVEWFAEEAKRINGETLPAFDNNRRLLVLRESIGVCAAITPWNFPLAMITRKVAPALAAGCPVIVKPAEHTPLTALAAAQLAVRAGVPAGVLGVLPADGANSIAIGKELCANDAVRHLSFTGSTEVGRILMAQSAATVKKLSLELGGNAPFIVFDDADLDSAVEGAMQSKYRNAGQTCVCANRIYVQDGVYDAFVEKLADAVRALKVGPGFDEGVTQGPLIEPEAVDKIERHIEDAVSKGGRVVAGGRRLGGLFFEPTVLVDATSQMLCAREETFGPLAPVFRFHADEDAIAAANATEFGLASYLYSRDVGRIFRAAEALESGMVGVNVGILATEHVPFGGVKQSGLGREGGRHGIDDYVEIKYMCVGDILK

SEQ ID NO: 29595 - protein, 1235 aa, Pseudoalteromonas tunicata D2
MQGSLKPKLPIGEFDAIKFKDKLTTAMLLQMALRLTLIVVLVSGATYWHITTIYENQVVETLNKYIKERSEKESVIFELAYDNHQVFKQHFIEAYNSGINISDDEFGQRFISHDDGTTRLQPEVFYGLATPQGDIIKNISGFIAPKAPINNQAFRNKLNISYHLLAQYGPAWTNRFASVYVTMPENVAILYWPDLPWGLDAAADLDFSKEPWFDVVIPKNNPERVPVWTDLYYDQTAQDWMVSLETPVDINGENILNIGHDILLLDLIDRIINDKLEGTYNFIVSSQGQLIVHPEIEDALKNKPHPVAKKLKNNTIPSQTINLITQRNTNETAILFDELQQAWLAVAPIKGPDWLLVTVYPKALVNEAAQSTARFVLIIGLLSLIVEMLMLYVVTLNKVVNPLKMLGKASSEIGKANYQLVASGAIELPSNRKDEVGILANAFKSMATRIFDYNTNLEQKVSERTSELVEARKKAESASKAKSNFLAHMSHEVRTPMNAIIGLSQLMLKTQLNKRQRDFMEKVLSSSDVLLNTLNDVLDYSKIEANKLTLDYTPFDIRDVLRRVTNISAYKAQYKGVELLLDIDQKVPFQWIGDPIRLGQILINLASNAVKFTEQGEVIIRVKLLEQHNQQSTLRFSVIDTGIGIEQERINLLFTPFMQMDSSITRKYGGTGLGLAISRQLTELMGGRIWVESQLNVGSQFHFTCKLTLNDSEKTPLMPFHNRLKGMRALVVDDNAMAREVLADILTSLGLEVTTVADGYAGIDELEKACSKQTPYDVVFLDWNIPGINGVETASKIERNVHITKPAAMLMVTAYDVDKFESDAHNVNIKKIISKPVDASCIHDNLVEIFFQEKTSRTCAQKRELNLNNSLDLSALRDKKVLIVDDSILNREVASEFLLDVGIQVSTANNGQQALDMINQYHYDLVLMDVQMPVMDGLTATKQLRKNPLHKQLPIIAMTAHASADDYRRSLDAGMNDHLNKPIDHQLLYLTVTRWIDASATINQFSADATIEFSAFGDSQNSNIQTKVRQSCPIQLSGFDTQTGLENHQNKIELYLKMLHMFLTEYSDYEIEIRAMLANQDCEALNRFFHTIKSSAASLGESILSTQAAHLEQFTGNLNSQNLAANLVVLDEYLQPFKQQFNHALATLNSLPPSRKQLTTSITDNDNAEIQKLIEQLNLFLADDNAAAELLIYELQSTSLSNQYPDEIDSILSSIQDVDYPRASNHLKILAEKLN

SEQ ID NO: 29596 - protein, 395 aa, Ehrlichia ruminantium str. Gardel
MVDGRKPHINVGTIGHVDHGKTTLTAALTTVLAKRLSGEGNKSVKYDEIDKAPEEKARGITISTAHVEYETENRHYAHVDCPGHADYIKNMITGAAQMDAAILVVSATDGAMPQTREHILLAKQVGVKDIVVWMNKCDVVDDEEMLSLVEMEIRELLTKYGYPGDDIDVVKGSAVKALEEESADGVWSEKIMELMNALEKIDLPIREKDKPFLMSIEDVFSIPGRGTVVTGRIERGVIKVGDKIDIVGLRDIQSTVCTGVEMFHKALDAGEAGDNAGILLRGIKKEDVERGQVLSAPGQIHSYKGFKAEVYVLKKEEGGRHTPFFSNYQPQFYVRTTDVTGNIKLPDGVEMVMPGDNISIEVNLDKPVAIDKGLRFAIREGGRTIGSGIITEILE

SEQ ID NO: 29597 - protein, 755 aa, Ralstonia solanacearum
MAKSKITEVESKESAASARAAKTGTARTSTAKPNKAADADTKRTVREAEAIPTPTSPAPRAEAAAEPKKRGRKPRAGAQADDESSTDVTEEFDEAPAAPAPKSDKQKARDRKAKEKALLKEFAATQQGGSEEELEARRQKLKALIKLGKSRGYLTYAEINDHLPDDMVDAESMDTLVATLNDIGIAVYEQAPDAETLLLNDNAPSVTTEEEAEEEAEAALSTVDSEFGRTTDPVRMYMREMGTVELLTREGEIEIAKRIEAGLKDMVMAISACPVTISEILAMGERVANDEAKIDEYIDGLIDPNADAAEAAQAGDEDEDFEDEDADESGDEEEDEDDDGSGSSAASARQLEELKQAALAKFAIIGDQFEKMRRAFEKEGYKSKPYLKAQEAIQNELMTIRFTARNVERLCDTLRGQVDEVRKLERAILNIVVDKCGMSRGDFVSRFPGNETNLGWINTVVADGKPYSAIVERNIPAVHELQQKLIDLQARVVLPLAELKDVNKKMSEGERRAREAKREMTEANLRLVISIAKKYTNRGLQFLDLIQEGNIGLMKAVDKFEYRRGYKFSTYATWWIRQAITRSIADQARTIRIPVHMIETINKMNRISRQILQETGNEPDPATLAEKMEMPEDKIRKIMKIAKEPISMETPIGDDDDSHLGDFIEDTNTLAPAEAALHGSMRGVVKDVLDSLTPREAKVLRMRFGIEMSTDHTLEEVGKQFDVTRERIRQIEAKALRKLRHPSRSDKLKSFLEGS

SEQ ID NO: 29598 - protein, 183 aa, Shigella flexneri 2a str. 301
MQDSILTTVVKDIDGEVTTLEKYAGNVLLIVNVASKCGLTPQYEQLENIQKAWADRGFVVLGFPCNQFLEQEPGSDEEIKTYCTTTWGVTFPMFSKIEVNGEGRHPLYQKLIAAAPTTVAPEESGFYARMVSKGRAPLYPDDILWNFEKFLVGRDGKVIQRFSPDMTPEDPIVMESIKLALAK

SEQ ID NO: 29599 - protein, 165 aa, Medicago truncatula
MDSISTSSTSSSVISTVQQKTPTKLTKPKKKKNNNNTYNKPIKVVYISNPMKVKTSASEFRALVQELTGQYAESPPNPSRFQEFDVNDSGTDQGGCENMMDCDKSDQTVVGVPSLVDPDDKGKPSEAGSSNESFDEDVLLMPEMMDNIWDLLPTSAFYESFQLDS

SEQ ID NO: 29600 - protein, 488 aa, Yersinia pseudotuberculosis IP 32953
MKIVNHWIDGKNITSKDYFTTINPATGEVLADVASGGIKEINQAVAAAKSAFPHWANLPMKVRARLMRRLGELIEQQIPEIAQMETQDTGLPIYQTQNALIPRAAHNFEFFAEICQQMNGQTYPVDDQMLNYTLVQPVGVCALVSPWNVPFMTATWKVAPCLALGNTAILKMSELSPLTADKLGELALEAGIPAGVLNVVQGYGATVGDALVCHQDVRAISFTGGTATGNRIMQRAGLKKYSMELGGKSPVLIFDDADIERAMDAALFSIFSLNGERCTAGSRIFIQESLYSAFIQRFAERASRLRVGDPQDLDTQVGALISKPHWDKVSGYIQLGIEEGATLLAGGPDKPIDLPAHLRGGHFLRPTVLADVDNRMRVAQEEIFGPVACLIPFKNEDAGLRLANSVPYGLAAYIWTQDVSKVLRLARSIEAGMVFVNTQNVRDLRQPFGGIKASGTGREGGKYSFDVFAEVKNVCISMGEHPIPRWGM

SEQ ID NO: 29601 - protein, 623 aa, Agropyron cristatum
MGSHTMPGKPPLPYAYKPLLSGTTDEANGQRTGCTRRRVCAAMLTASAMVVVVVAAAFLARARVDKVVNEEAAGGFPWSNEMLQWQRSSYHFQPAKNYMSDPDGLLYYGGWYHMFYQYNPVGTDWADGMAWGHAVSRNLVQWRTLPIAMKPDQWYDILGVLSGSVTVLPNGTVIMLYTGATNDWYVEATCLALPADPNDPLLRRWTKHPANPIIWSPPGIGTKDFRDPMTPWYDDSDHTWRTLFGSKDDHHGHHDGIAIMYKTKDFLNYELIPGILHRVENTGEWECIDFYPVGGGGSENSSEVLHVLKASMDDERHDYYSLGTYDSAANIWTPIDPELDLGIGLRYDWGKFYASTSFYDPAKKRRVLMGYVGEVDSKRADVVKGWASIQSVPRTIALDEKTRTNLLLWPVEEIETLRLNATELSDVTLNTGSLVHVPLRQGTQPDIEATFHLDAAAVAALNEADVGYNCSSSGGAVNRGALGPFGLLVLAAGDRRGEKTAVYFYVSRGLDGGLQTSFCQDELRSSRAKDVTKRVIGSTVPVLGGEAFSMRVLVDHSIVQGFAMGGRITMTSRVYPMEAYQEAGVYLFNNATGASVTAERLVVHEMDSAHNQLSNEDAYMYVR

SEQ ID NO: 29602 - protein, 311 aa, Zea mays
MAQGANFPGFIGAVGGHDGGVNFGGNFCDMAFYQKLGEGSNMSVDSLNSMQTSMHGGSITMSVDNNSSVGSNSDSRTGMLGHPGLKGPVIVGSYSVGHSIFRPGRVSHALSEDALAHALMDNKFPTETLKDYEEWTIDLGKLHLGMPFAQGAFGKLYRGTYNGMDVAIKLLERPEADPEKAQLLEQQFVQEVMMLATLRHPNIVKFIGACRKPLVWCIVTEYAKGGSLKNFLSRRQNRSVPLKLAVKQALDVARGMAYVHGLGFIHRDLKSDNLLISGDKSIKIADFGVARIEVKTEGMTPETGTYRWMAP

SEQ ID NO: 29603 - protein, 365 aa, Idiomarina baltica OS145
MNYRGNSAFSHQQADKVGVLLTNLGTPDAPTKAALKPYLKEFLSDPRVVEFPRWLWKIILNGIILNIRPKRSAEAYKTVWTDRGSPLLYHTEDQAAAVQHALTEDLGEHVVVDYAMRYGKPSIQDALDRMMRAGARKLLVLPLYPQYSASTVGSTFDAIANDFTQRRWLPEFRFISHYHDYDPFISALVNKIERHWETHGRADKLIFSYHGVPLRYLKNGDPYHCECYKTTRLVAERLGLSEHEYMTTFQSRFGREEWLKPYTDETLKALPKQSVKSVQVMCPGFSSDCLETIEEIGEENREYFIENGGERYEYISALNADEEHISALVSLIKDNLAGWTVPEQQAEALATRQREADKVERNTAS

SEQ ID NO: 29604 - protein, 336 aa, Mycobacterium bovis AF2122/97
MKLAIIAGDGIGPEVTAEAVKVLDAVVPGVQKTSYDLGARRFHATGEVLPDSVVAELRNHDAILLGAIGDPSVPSGVLERGLLLRLRFELDHHINLRPARLYPGVASPLSGNPGIDFVVVREGTEGPYTGNGGAIRVGTPNEVATEVSVNTAFGVRRVVADAFERARRRRKHLTLVHKTNVLTLAGGLWLRTVDEVGECYPDVEVAYQHVDAATIHMITDPGRFDVIVTDNLFGDIITDLAAAVCGGIGLAASGNIDATRANPSMFEPVHGSAPDIAGQGIADPTAAIMSVALLLSHLGEHDAAARVDRAVEAHLATRGSERLATSDVGERIAAAL

SEQ ID NO: 29605 - protein, 498 aa, Bacillus clausii KSM-K16
MDREQKYRRLEQASPEEIAALQKQVKESEWRQTYHIQPVTGLLNDPNGFAYFAGEYHLFYQWFPLGTYHGLKYWYHTASKDLVHWRNVGKAIAPDTSFDSHGVYSGSGIVKDSQLHLMYTGNARDENWNRQTSQCIAVMDENRAVSKWEKPVIDQVPAGYTAHFRDPKVWKDDDMYRCVIGTQRNDFTGTAVVYESPDLLEWRFVGEMGTNLNDFGYMWECPDYFELDGQGVFLFCPQGLAPEGDRFLNLYQSGYVTGKPLNRETLVFSHGCFHELDRGFDFYAPQTMKDMQGRRIMVAWMGQPEIGYPTDSHGWAHCLTLPRTLELCDGKLLQKPVVELQKLRQKRSDVQDTLTNEAKTYDGIAGAAFEMICTFDPLEAEAVGIEIRSSEKERTVITYNTVMQKVTMDRSMAGEIINSSYGATRSCRLVAEQIQFHLFVDTSSVELFINDGEEVFTSRIFPQPDSKGIRFFVNKGNAHLKATKWDLTHAGNDIEGNE

SEQ ID NO: 29606 - protein, 393 aa, Candida albicans SC5314
MPVNFLTSVVFDGPEVIPYWDQIKEYGPTVLPILLTLAGAKYYFHGATNTWERDMHGKVFMITGATSGIGAQIAYELGQRGAQLILLTRRTNDQWVAEYIEDLRDKTNNGLIYAEECDLSSLYSIRKFATRWLDNQPPRRLDGVICCAAECIPRGKSRQITMDGVERQIGINYLAHFHLLTLLGPSLRVQPPDRDVRVLIATCSSQNLGDVDLNDLLWSDKRYPATQPWKVYGTSKLLLGLFAKEYQRQLMGYERKDKAPCNVRINLINPGIVRTPSTRRFLSLGTVWGLIIYLILFPIWWLFFKSAEQGTQSFYFALFAPIFMKIEGGNVVQECKIMTKVRKEYTDDDLQQKVFHNTEELIKQIETKSAIERKKHENAKKTPEQKARKGKRN

SEQ ID NO: 29607 - protein, 92 aa, Cenarchaeum symbiosum
MADKIKCSHILVKKQGEALAVQERLKAGEKFGKLAKELSIDGGSAKRDGSLGYFGRGKMVKPFEDAAFRLQVGEVSEPVKSEFGYHVIKRLG

SEQ ID NO: 29608 - protein, 497 aa, Mycobacterium sp. KMS
MANTVQHWCNNDVFAGGSQATAPVTNPATGEVTGQVALAGVEDARTVIEAAAAAFPAWRDTSLAKRTSVLFNFRELLNARKHELAAIITAEHGKVLSDALGEVSRGQEVVEFACGIPHLLKGGFTENASTNVDVYSIRQALGVVGIISPFNFPAMVPMWFFPVAIATGNTVVLKPSEKDPSASLWLARLWKEAGLPDGVFNVLQGDKTAVDELLTHPKVKAVSFVGSTPIAQYVYATGTAAGKRVQALGGAKNHAVILPDADLDLAADAMVNAGFGSAGERCMAISACVAVGPIADDLVAKIGERARALRTGDGTKDSDMGPLVTKAHRDKVASYIDAGEADGAKVVVDGRQVSADGGENGFWLGPTLLDNVTPEMSVYTDEIFGPVLSVVRVETYDEALELINSNPYGNGTAIFTNDGGAARRFQNEVEVGMVGINVPIPVPMAYYSFGGWKNSLFGDSHAHGTEGVHFFTRGKAITQRWLDPSHGGINLGFPQNN

SEQ ID NO: 29609 - protein, 537 aa, Bradyrhizobium sp. BTAi1
MSSTGTGRERLYLFDTTLRDGAQTNGVDFTLADKRVIARMLDELGIDYVEGGYPGANPLDTEFFAEKPRLGQARFTAFGMTRRAGRSVSNDPGVAALLEAKADAICFVAKSSAYQVRVALETTNEENLASIRDSVTAARAAGREVMLDCEHFFDGYKENAEFALACARTAYEAGARWVVLCDTNGGTMPHEIETIVGVVAKHVPGDHLGIHAHNDTEQAVANSLAAVRAGVRQIQGTLNGLGERCGNANLCSLIPTLKLKGEFSSRFEIGVSDQQLGSLVKVSRTLDDMLNRAPNRHAPYVGESAFVTKTGIHASAVLKDPQTYEHVAPESVGNHRKVLVSDQAGRSNVIAALERGGIPFSKNDPKLTRLVEELKEREAAGYAYESANASFELLARRTLGSVPEFFRVEQFDVNVEQRYNAVGERITVALAVVKVDVAGERLISAAEGNGPVNALDVALRKDLGKYQGYIDGLKLIDYRVRILNGGTEAVTRVLIESEDETGERWTTVGVSPNIIAASFQALMDSVFYKLVKSGAAG

SEQ ID NO: 29610 - protein, 144 aa, Zea mays
  misc_feature (28)..(28): Xaa can be any naturally occurring amino acid
TLEGPGVGLPSLSAEMMNSSDMKDGKGXRLGEALEALEKSINARAGADAAMQSSLQQENSMLRQQLEAIVQENGLLKRAVVMQQNRQKESDDQSQELQHLRQMVTQYQEQLRTLEVNNYALTLHLKQAQQNNSSIPGRFHPDVF

SEQ ID NO: 29611 - protein, 369 aa, Candida glabrata CBS 138
MSSVISVVKRTGGFQSNSIESDFESDEDMSYGSDVEEGQDADGDMEMKEEKGKGNSDIVTPGELITDDPVWMRGHGTYFLDNMTYSSVAGTVSRVNRLLSVIPLRGRYAPETGDHIIGRIAEVGNKRWKVDIGSKQHAVLMLGSVNLPGGILRRKSESDELQMRSFLKEGDLLNAEVQSLFQDGSASLHTRSLKYGKLRDGIFCQVPSSLIIRSKNHTHNLPGNVTVLLGVNGFVWLRKTSKMDLTRDAPPGGSTGAGRESSVGPTGATHVNTNTNISITRLEEESSWQIYSDENDPTIKNSERKTISRYANVIKALAFCEIGITQERIISAYEASMAFPNIGSLIEKETMESIGRDVITVERMRGTEQ

SEQ ID NO: 29612 - protein, 112 aa, Photorhabdus luminescens subsp. laumondii TTO1
MKLITTIIKPFKLEDIREVLSGLGVQGLTITEVKGFGRQRGHAELYRGAEYSVNFLPKIKIDIAVADELVEEVIHAIQQSAFTGKVGDGKIFVIELQQAIRIRTGETNDAAL

SEQ ID NO: 29613 - protein, 71 aa, Zea mays
MADWGPVVIATVLFVLLTPGLLFQLPAHGRIVGFGTMHTSGIAILVHAVLYFALITIFLSSSASCFLVMYY

SEQ ID NO: 29614 - protein, 303 aa, Arabidopsis thaliana
MIYFCGNFITWRTLALLGALPCFIQVIGLFFVPESPRWLAKVGSDKELENSLFRLRGRDADISREASEIQVMTKMVENDSKSSFSDLFQRKYRYTLVVGIGLMLIQQFSGSAAVISYASTIFRKAGFSVAIGTTMLGIFVIPKAMIGLILVDKWGRRPLLMTSAFGMSMTCMLLGVAFTLQKMQLLSELTPILSFICVMMYIATYAIGLGGLPWVIMSEIFPINIKVTAGSIVTLVSFSSSSIVTYAFNFLFEWSTQGTFFIFAGIGGAALLFIWLLVPETKGLSLEEIQVSLIHQPDERNQT

SEQ ID NO: 29615 - protein, 258 aa, Exiguobacterium sibiricum 255-15
MLTPQYVKASIDGRIGRIRLNRPERYNALNRAMIREIVEAMERFDQDETVAVIVLNGEGKSFSAGADIEEMVDATPVSMELLDPFADWDRISRLHKPLIAAVHGFVLGGGFELALACDLIYATPETQFAFPEVGLGVMPGAGGTQRLTKRIGRTRALEWLWTGDRMPASEAQQLGIINRIVEADQLEAHVLTVAERIAAQPVMSVRLIKDAVDKAGNLSLQDGMDHERRNFYLLFGTNDQTEGMQAFVEKRQPTFKGN

SEQ ID NO: 29616 - protein, 502 aa, Exiguobacterium sibiricum 255-15
MSTVHEKTIEMKRSVYHLVINGEQVEGTSGETFKTYNPATGEVIAEVAKASKADADRAVQAARDAFDHGKWKMWPVGRRSQVLNKIAGIMRSRFNELVELEILDTGKSLAAAQGQITQAIEDFEFYAGAIVGHRGSVNNVPGQFHNYTEKEPVGVCAQIIPWNYPLMMAAWKVAPAIAVGCSVVVKPATLTPLTAIILGEICLEAGVPAGVVNVIPGSGREIGNHLVEHPNVNKVAFTGSTPVGKDIMGRASESLKRVTLELGGKSPNLVFEDADITAAVDGSLFGIFYNSGQSCEARSRLYIHEDIYDTFMEQFVAKTKQLVLGNPFDKGTHVGAIIDQQQLDVIDGYVQSAKADGATILTGGQVEKVAGFEEGFWYAPTIIADVTHDMKAVQEEIFGPVVVVMKFKDEKEAVRLANDTEFGLGSAIWTKDGARATRIANQIKAGIVMINCPFSAFPGTPFGGYKQSGFGRELCIETLDLYTETKSILSYYGSRPLNPFGL

SEQ ID NO: 29617 - protein, 260 aa, Triticum aestivum
  misc_feature (56)..(56): Xaa can be any naturally occurring amino acid
GRPTRPKLGDAFHAREYRSIVFQEPRFVEYFRSATPETEYGRMNIGSRPSKRKPSXGGIESLRAIPWIFAWTQTRFHLPVWLGFGAAFKHIIQKDIRNIHTLKEMYNEWPFFRVTLDLLEMVFAKGDPGIAALYDKLLVAEDLQSFGEQLRQNFEETKQLLLQVAGHKDVLEGDPYLKQRLRLRESYITTLNVCQAYTLKRIRDPSFEVTPQQPPLSKEFCDKEPAELVQLNRGSEYAPGLEDTLILTMKGIAAGMQNTG

SEQ ID NO: 29618 - protein, 479 aa, Triticum aestivum
  misc_feature (224)..(224): Xaa can be any naturally occurring amino acid
MARNAADKATSIDAQLRMLAPKKLSEDDELVEYDALLIERFLCILQGLQGDKIRETVQECYELAAEYERTLDPKQLDEIGNLLARLDPEDSIVTTKSLSHMLILANLAEEVQIAYRRRQKLKSGDFADENSATTESDIEETLKRLVCQLKKSPLEVFDALKNQTVDLVLTAHPTQSVKEVTCSKNMAGIRSCLTQLYAKDITPDEKQELDEALQREIQAAFRTXDEIRRAPPTPQDEMRAGMSYFHETIWKGVPKFLRRVDTALKNIGIKERVPYNAPLIQFSSWMGGDRDGNPRVTPEVTRDVCLLARMMAANLYYAQIEDLMFELSMWRCSDELRVKADQLHRASKKDTTKHYIEFWKQVPPSEPYRVILSDVRDKLYNTRERSRHLLASGFSEIPDDAIFTDVEQFLEPLELCYRSLCACGDHTIADGNLLDFLRQVSTFGLSLVRLDIRQESERHTDVMDVITKYLGVGSYREWS

SEQ ID NO: 29619 - protein, 311 aa, Triticum aestivum
  misc_feature (172)..(172): Xaa can be any naturally occurring amino acid
  misc_feature (177)..(177): Xaa can be any naturally occurring amino acid
  misc_feature (205)..(205): Xaa can be any naturally occurring amino acid
MASFGSMAVALVVCAMLLQSCGATRRLQALVQEQPITMKYHKGALLSGRIAVNLVWYGNFSAPQRAIVTDFVSSLASASPAPAPQPEPSVATWFKTAQKYYASSKARFPALALGSHVFDRSYSLGKHLRERDLVRLAARGGPSRAINVVLTADDVAVDGFCMSRCGSHGASXGPVRXRFAYVWVGNPATQCAGQCAWPYHRLTSXYRASPLAPPNGDVGVDGMVVSLASMIVGTVTNPFGNGFFQGPAEAPLEAATACAGVYGKGAYPGYAGSLLVDPATGASFNANGAHGRKYLVPALVDPDTSACSTLG

SEQ ID NO: 29620 - protein, 492 aa, Streptomyces coelicolor A3(2)
MTHELFDSKGLLGSAPAAFVAGEYELDSSHGTLPVINPANGQLVAEVPSSSSSTVDRAVTAAVAAQREWGRRSHVARAAVLEAVRDAIAVHADELARIVSVEQGKPLSDARGETEGACAFFDFAISQKYRAVGSMMASEPGRSLGVREEPIGVVAAILPWNFPVAIFARKVAPALMAGNAVVLKPSELTPLSALALARLCRLAGVPDGLLSVVCGEGKDTGRALVTHPGVGMVTMTGSTRGGREILAQVADQIIPVSLELGGKAPFIVFEDADLDAAVEAAADARLWNTGQVCTCNEVTYVHADLHDEFVRRVVDRFASVTPLDPFAAGSRLGPLVAERERTRVQGMVDAAVAAGARVRTGGGRPDGEQYQSGAWFAPTVLTNVRPEMDIARREVFGPVLPIIPFDAEAEVVSAANSTAYGLTAYVYTRDLSRAMRMIDALEFGEVYVNQAGPEQVQGFHTGWKSSGLGGDDGPHGYEKYLRRKTVYVRHAV

SEQ ID NO: 29621 - protein, 526 aa, Triticum aestivum
MAMAMRRAAALGARHILAASASASSRVASRRHMGSVDAGAAMDKIRAAGLLRTRGLIGGQWVDAYDGKTTEVQNPATGEVLANVACMGNRETADAITSANTTFYTWSKLTASERSKALRKWHDLLMSHKEELALLMTLEQGKPMKEALGEVNYGASFIEFFAEEAKRVYGDIIPPTLADRRLLVLKQPIGVVGAITPWNFPLAMITRKVGPALACGCTVVVKPSEFTPLTALAAADLALQAGIPAGALNVVMGNAPEIGDELMQSTQVRKITFTGSTAVGKKLMAGSANTVKKVSLELGGNAPCIVFDDADIDVAVKGSLAAKFRNSGQTCVCANRILVQEGIYEKFASAFVKAVQSLQVGNGLEESTSQGPLINEAAVEKVEKFVGDATSKGANIMLGGKRHSLGMSFYEPTVVGNVSNDMLLFREEVFGPVAPLIPFKTEEEAIHLANDTNAGLAAYMFTKSIARSWRVSEALEYGLVGVNEGLISTEVAPFGGVKQSGLGREGSKYGMDDYLEIKYVCMGNLG

SEQ ID NO: 29622 - protein, 538 aa, Phanerochaete chrysosporium
MLVSVDALALRTLVYELTYLLYPAVPTAAALILLQRFGNVWLPTWTIVLLSLCNVPVAHRILVWLKDGRRWPGSIDLLRQLTQTFETGFLSEMLWGYMHVLGQTFEVYILWDSNYVTSDANVIKTILATDFDNFVKGEKLDVCVRPVLGTGVFNSDGEMWKFHRSMTRPFFTRERISHFDLFDRHADATMAKMKARLAEGFAVDFQDLISRFTLDSATEFLFGQCTTGASRTEDFARAFAEAQDAVSFRLRMGWLWPDAVARADKIKRENGGRVPEVKGEIEEDETLLDHLVNVVQTKILHDEVLNIMIAGRDTTGGTLTSAVYFLSQYPEVLRRLREEILEKVGPTRRPTYDDIREMKYLRAFINETLRLYPAVPWNVRYPVKDTTIPGPHPDKPYFIPANTPVSYSVHCMHRRTDYWGPDAEAFDPDRFLDARVQRYLTPNPFIFLPFNAGPRICLGQQFAYNEMSFFVIRLLQHFDEVQLCEDALAPDCRVPDAWRGAPGRKGVERFWPKAHLTLYAKGGLWVKMREASTSEAVV

SEQ ID NO: 29623 - protein, 204 aa, Triticum aestivum
YNKFVQKSRLVPVRNSRDIVDPRVRLQGISTTLGHITRAAHPPAAYMAASKGARKSLVSRTLERCRSGLASGGRSSAAVAPGCFSVYVGPERERFVVRADRANHPLFRRLLDDAEQEYGYAAQGPLALPCSVDAFLDVLWHMDHDVQDDDDGEAAVAPSTPICGLQRAGSGNIKVRPAGYRVLSPAKSTPASFFFSQTAAGGRR

SEQ ID NO: 29624 - protein, 396 aa, Ralstonia eutropha JMP134
MAKEKFERTKPHVNVGTIGHVDHGKTTLTAAIATVLAAKFGGAAKKYDEIDAAPEEKARGITINTAHVEYETANRHYAHVDCPGHADYVKNMITGAAQMDGAILVCSAADGPMPQTREHILLARQVGVPYIIVFLNKCDMVDDAELLELVEMEVRELLSKYEFPGDDTPIIKGSAKLALEGDKGELGEVAIMNLADALDTYIPTPERAVDGTFLMPVEDVFSISGRGTVVTGRIERGVIKVGEEIEIVGIRPTVKTTCTGVEMFRKLLDQGQAGDNVGLLLRGTKREDVERGQVLCKPGSIKPHTHFTGEVYILSKDEGGRHTPFFNNYRPQFYFRTTDVTGSIELPADKEMVMPGDNVSITVKLIAPIAMEEGLRFAIREGGRTVGAGVVAKILD

SEQ ID NO: 29625 - protein, 229 aa, Synechococcus sp. WH 7803
MVTTPDAFGIGGFSIHWSAAMPPTTASVQSQCPYCGVGCGLDLLPPGEAGKAVKRDAEGNPMWSARGHREHPSSHGQVCIKGATVGETLGQGRLSQPLYRATLTDPFEAISWNSAFDLLTERIQSTLASKGADAIAMYGSGQFHTEDYYIAQKLLKGALGTNNFDANSRLCMSSAVAGYTRSLGSDGPPCCYEDLDHCSVVILIGTNTAECHPVLFQRLLKRKKRDPSL

SEQ ID NO: 29626 - protein, 353 aa, Bacillus subtilis
MKLEKLRNLFGQLGIDGMLITSNTNVRYMTGFTGSAGLAVISGDKAAFITDFRYTEQAKVQVKGFEIIEHGGSLIQTTADTVESFGIKRLGFEQNSMTYGTYASYSAVISDAELVPVAESVEKLRLIKSSEEIKILEEAAKIADDAFRHILTFMKPGISEIAVANELEFYMRSQGADSSSFDMIVASGLRSSLPHGVASDKLIESGDLVTLDFGAYYKGYCSDITRTVAVGQPSDQLKEIYQVVFDAQALGVAHIKPGMTGKEADALTRDHIAAKGYGDYFGHSTGHGLGMEVHESPGLSVRSSAILEPGMVVTVEPGIYIPETGGVRIEDDIVITENGNRTITHSPKELIIL

SEQ ID NO: 29627 - protein, 273 aa, Staphylococcus aureus
GTPYKESDIEPYYTDIRHGKRPSEEELQDLKDRYEFIGGLSPLAGTTDDQADALVSALNKAYADVEFKLYLGLKHISPFIEDAVEQMHKDGITEAITVVLAPHYSSFSVGSYDKRADEEAAKYGIQLTHVKHYYEQPKFIEYWTNKVNETLAQIPEEEHKDTVLVVSAHSLPKGLIEKNNDPYPQELEHTALLIKEQSNIEHIAIGWQSEGNTGTPWLGPDVQDLTRDLYEKHQYKNFIYTPVGFVCEHLEVLYDNDYECKVVCDDIGANYYR

SEQ ID NO: 29628 - protein, 538 aa, Oryza sativa (japonica cultivar-group)
MSRLSSIYSQHRTSGLRSDRSIMPNSTSNSLRTISSVHLPYNHRARNFHISHAVGDSSEHVIINGQASPSKVVQADAAALGTIAADMAPVVDGFSADDDELDLDSPTEGFSSIPEAIEDIRQGKYVIVVDDEDRENEGDLIMAASKVTPEAMAFIVRHGTGIVCVSMKEDDLERLELPLMVTTKENEEKLRTAFTVSVDAKEGTTTGVSAKDRANTVLALASPNSKPEDFNRPGHIFPLKYREGGVLKRAGHTEASVDLAMLAGLPPAAVLCEIVDDDDGSMALLPKLQDFARRENLKIISIADLIRYRRKRDRLVERVCVTPLQLQWGSFQSYCYRSLIDGMEHIAMVKGDVGDGQDILVRVHSECLTGDIFGSARCDCGNQLALAMTMIEKTGRGVVVYLRGHEGRGIGLGHKLRAYNLQDDGRDTVEANEDLGLPVDSREYGIGAQILRDLGVRTMRLMTNNPAKYTGLKGYGLSVLGRVPLLTPITNENRRYMETKRLKMGHVYGTRPSGNTSTLADGGIKKEQDQIDSASEQE

SEQ ID NO: 29629 - protein, 370 aa, Aspergillus awamori
MSNLPHEPEFEQAYKELASTLENSTLFQKNPEYRKALAVVSVPERVIQFRVVWEDDAGNVQVNRGFRVQFNSALGPYKGGLRFHPSVNLSILQVPWFRADLQECSHWPEHGWWYVEHMIAHATNGQESFKGKRVAISGSGNVAQYAALKVIELGGSVVSLSDTQGSLIINGEGSFTPEEIELIAQTKVERNELASIVGAAPFSDANKFKYIAGARPWVHVGKVDVALPSATQNEVSGEEAQVLINAGCKFIAEGSNMGCTQEAIDTFEAHRTANAGAAAIWYAPGKAANAGGVAVSGLEMAQNSARLSWTSEEVDARLKDIMRDCFKNGLETAQEYATPAEGVLPSLVTGSNIAGFTKVAAAMKDQGDWW

SEQ ID NO: 29630 - protein, 340 aa, Pseudomonas aeruginosa UCBPP-PA14
MTENALLLLNLGSPDSTRVEDVRRYLDQFLMDPYVVDLPWPLRRLLVSLILIKRPAESAHAYSSIWWDEGSPLIVLSRRLQEAMKPHWPHGPVELAMRYGQPAIEKVLLDLARRGIRRVTLAPLYPQFADSTTTTAEQEVRRVIAAHRLELEVSTLPPFYDQPVYLDALVESVRPYLQQPHDHLLLSFHGLPERHIRKLVKDPAHDLLAENSRNVSPEALALCYRSQCLRTAEAFAERAGLEQGRWSVSFQSRLGRAKWIEPYTDAKLDELVQRGVKRLLVMCPAFVADCIETLEEIGMRGREQFISAGGEDLVLIPCLNDHPAWVGALGEMSGRLARPL

SEQ ID NO: 29631 - protein, 291 aa, Glycine max
MYKRSNEEKDVSSKKVRNCDTAESNIQSAIVDGEDTSEIPSFPLGNLSTSWCSLVCKPAAIKTANRYFLLQKVTQSWPSPALCFVETVPQDAQSSHVTAFNSGDGSSKSDNERDVHISMRLMEDFLDLAKENTEKDLETCGILGAYLEKGTLYLTTLIIPKQESASNSCQATNEEEVFKILNERSLYPVGWIHTHPSQSCFMSSVDLHTQYSYQVMIPEAFAIVLAPNDTSRSCGLFRLTKPEGMNILKNCQETGFHPHKEPDNGSPVYEHCSNVYKNSNLRFEIFDLRQK

SEQ ID NO: 29632 - protein, 144 aa, Arabidopsis thaliana
MQRQEDNGRGLKMAVPLLTKKVVKKRSAKFIRPQSDRRITVKESWRRPKGIDSRVRRKFKGVTLMPNVGYGSDKKTRHYLPNGFKKFIVHNTSELELLMMHNRTYCAEIAHNISTKKRKAIVERASQLDVVVSNKLRLRSQEDE

SEQ ID NO: 29633 - protein, 379 aa, Phacus smulkowskianus
IGHVDHGKTTLTAAITMALAATGNSKAKKYEDIDSAPEEKARGITINTAHVEYETKNRHYAHVDCPGHADYVKNMITGAAQMDGAILVVSGADGPMPQTKEHILLAKQVGVPNIVVFLNKEDQVDDKELLELVELEVRETLSNYEFPGDEIPVVSGSALLSVEVLTKNPKTTRGENKWVDKILDLMDQVDSYIPTPTRDTEKDFLVAVEDVFSITGRGTVATGRVERGSVKVGETVELIGLKPTRTTTVTGLEMFQKSLDESVAGDNVGILLRGIQKNDIERGMVIAKPGSINPHIKFDAQVYILPKEEGGRHTPFFEGYSPQFYVRTTDVTGKIESFKSDDDSPAQMVMPGDRIKMQVELIQPIAIEKGMRFAIREGG

SEQ ID NO: 29634 - protein, 385 aa, Candida glabrata CBS 138
MSAANDKLPDILQDAVLKASVPVPDDFVQVKGIDYSAATATDMRASDLVNSMKTMGFQASSLGKACDIIDEMRSWRGKHIDELDEHDRKGQFDDAGYQKTTVFMGYTSNLISSGLRETLRYLVQHKMVDALVATAGGIEEDIIKCLAPTYLGEFSLEGKSLRDQGMNRIGNLLVPNDNYCKFEEWIVPIFDKMLEEQEEYVAKHGKDCLDANTDVDSPIWTPSKLIDRLGKEINDESSVLYWAHKNKIPIFCPAITDGSIGDMLFFHTFKASPKQIRLDIVADIRKINSMSMEASKAGMIILGGGLIKHHIANACLMRNGADYAVYINTGQEFDGSDAGARPDEAVSWGKIKAEAKSVKIYADVTIVFPLIVAATFANGKPLPKN

SEQ ID NO: 29635 - protein, 108 aa, Idiomarina baltica OS145
MSEVIVQLSDDSFEADVINSDKPVLVDFWAEWCGPCKMIAPILDDISKDYEGRLTIGKLNVDHNDQTPPKYGIRGIPTLLLFKNGEVVATKVGALSRAQLTEFLDQHI

SEQ ID NO: 29636 - protein, 481 aa, Pseudomonas aeruginosa UCBPP-PA14
MNGLPMNLIWFRCDLRTTDNSALLAAADGRPCVALYLLSPAQWREHDDAPCKVDFWLRNLGELQRQLAALNIPLLVRDCGHWRQAPEVIGRLCRELGIGAVHVNQEYGVNEERRDQAVGQRLREQGVAFHSHLDQLFFAPGSVLTRTGGYFQVFSQFRKVCHERLYQALPGVRPRPQPQPPHALASDPLPDAVPAFPRPADSLRRLWPAGEEVAQERLRGFADQHLADYHERRDFPALPGTSQLSPYLAAGVLSPRQCLDAALVANRGEFSGGQQGAATWINELLWREFYKHILVGYPRVSRHRPFREETEALRWRQAPAELEAWQQGRTGIPIIDAAMRQLLATGWMHNRLRMVVAMFLSKNLLIDWREGERWFMRHLIDGDLAANNGGWQWSASTGTDAVPYFRLFNPLSQSERFDPRGEFIRHWLPELAGLERKAIHDPSSLGLFAGVDYPRPMVDLKASRERALAAFRNLPPRDGRA

SEQ ID NO: 29637 - protein, 841 aa, Leptospira interrogans serovar Copenhageni str. Fiocruz L1-130
MIKSLRISCIFFILISFLTFLLNCSQFKQNNPIASNGVIDLSTWNPNIESINLKGNWEFCWDQWIPPNAEESQWKENCNGFYPVPAYWKFYNIPGKNLSPFGKATYRLKVILPTSFHDSYGIRWTEILSAFQIFINNKSVAQIGVLGTDFNTMTPKLKPDRTEIGPQNNQMTIVIWVSNFNHQNHGFWQPIYLGKWEIIRNTQVSHLMMDIASFASVALIGFYHLVLFLFRTRSKEYLFFGLFCISMGIRQLSVEDHAFIIFFPDIDFDFYIRFIYFTVLSIGIFMCMFIKSLFPEEVSSFFINSAIGVFGCSSFTLALPVRVFTEFFSIIFVLISFLPLGLTTYLFKAHKMKRKGATLILIAYLIFSTVVLNDILFTLGYISTGYISYIGITVFIFFQAGVLAQQLTQAFNHSEDLALELKSTLQENIETHNELLALKELQNTNLEFQVQSRTRELLKARDDAEFANKVKSQFLASMSHEIRTPLNGIIGLIEQFKSTPLDENQQYIRNLIQKSGENLLKIINDILDFSKLEEDKINLELHEFYWKETVEETIGIFLYQATQKGLVLSVDYSPDFIDKSVGDKRRITQVLSNLISNAVKFTDSGKIQIRAFSEKIETKIEYKIQVIDSGIGIPREKIDLLFQKFFQLDSSISRKYGGTGLGLAISKKLVELMNGKIHVSQNKSKGSTFEFTVLLSEFVSKDHSTYLPEITDLSSLSPDTFILIAEDDSTNIFLLSGILKKLKIKFELAKDGLEAITKVRVSRFDLIFMDINMPHLDGISASNFILTDPMISPKPVIIAVTADVLQEDKIKCRQAGMSDFLGKPYYKKDIEQMIYKWLVIH

SEQ ID NO: 29638 - protein, 168 aa, Lycopersicon esculentum
TRLNCVIVSVDGSEESMNALNWTLDNIKLKPHDPDSPESQGFIVILHVQSPPSIAAGLNPGAIPFGGPSDVEVPAFTAAIEAHQKRITQAILDHALGICAKKNANVKTQVVIGDPKEKICDAVEEMNADLLVMGSRAFGPIKRMFLGSVSNYCTNHAQCPVIIVKATP

SEQ ID NO: 29639 - protein, 206 aa, Zea mays
MASRRRTLLKVIILGDSGVGKTSLMNQYVNKKFSNQYKATIGADFLTKEVQFEDRLFTLQIWDTAGQERFQSLGVAFYRGADCCVLVYDVNSMKSFDNLNNWREEFLIQASPSDPDNFPFVLLGNKVDVDGGNSRVVSEKKAKAWCASKGNIPYFETSAKDGTNVEDAFQCIVKNALKNEPEEELYVPDTVDVAGGNRAQRSSGCC

SEQ ID NO: 29640 - protein, 123 aa, Oryza sativa
MASSATETETVRASHILIKHEGSRRKASWKDPDGRVISATTRADAAARLADLRDQILSGRANFADLAARHSDCSSARRGGDLGTFGRRQMQKPFEDATFALKVGEMSDTVDTDSGVHIILRTA

SEQ ID NO: 29641 - protein, 256 aa, Exiguobacterium sibiricum 255-15
MIHLERLDHVAVIRVDRPERLNCFDYPTLVELKELVATVRREPDIRVVLFTGTGKAFSAGADLKERVTLNETEVRRNVEMIRDVFADIARLPQPTIAAVNGHALGGGFEWMLACDFRIIVNGALVGLTETSFGIIPGAGGTQRLPRLIGETRAKEMIFTAKKIDAETAERYGIVSRVVPTVEELMEVCLAFADEMLRNGPIAIRQAKQAIDQGLDHTLSEGLKLETAAYETVIPTEDRLEALRAFAEKRTPQFQGK

SEQ ID NO: 29642 - protein, 417 aa, Burkholderia sp. 383
MALIVHKYGGTSMGSVERIKNVAKRVAKWHQAGHQMVVVPSAMSGETNRLLGLAKEISSQPSPRELDMIASTGEQVSVGLLSIALQEIGVEAVSYAGWQVPIKTDSAFTKARIHSIDDERVKADLNAGKVVIITGFQGVDPDGHITTLGRGGSDTSAVAVAAALGAEECLIYTDVDGVYTTDPRVVEEARRLDRVTFEEMLEMASLGSKVLQIRSVEFAGKFQVKTRVLSSLTDPLIALDEEMRSGTLITFEEDETMEKAVISGIAFQRDEARIAVMGVPDKPGIAYQILGPVADANVDVDMIIQNQSVQGKTDFTFTVGRGDYQKAMDILTNQVKGHVNAEQVQGDPKVSKVSVVGVGMRSHVGVASKMFRTLSEEGINIQMISTSEIKISVLIDEKYMELAVRALHKAFELDQAS

SEQ ID NO: 29643 - protein, 548 aa, Idiomarina baltica OS145
MKAADLMVKALENEGVQYVFGIPGEENLDLLESLSNSSIELVLTRHEQAAGFMAATYGRLTGKPGVCLSTLGPGATNLVTSVAYAQLGAMPMVVITGQKPIKDRPQGQFQIIDVIDMMTPITKYTQPIISAKTIPSHVREAFRRAEDERPGAAHLELSDDIAAEEVDATPITPSYSRRPITEHKSVDYVLKLLKEAKHPLIVIGAAANRKITAKMLRAFVDKTGIPFITTQMGKGVINEDHPRWLGNAAVSDGDYPHRAIEQADLILNVGHDVVEKPPFMMKPDQRKVVHINFQGAQVDSVYFPHASMIGDIGNSIWQLKEGIEPQSHWDFEFMLKVREHMRDHTDEGAHDEAFPMLPQRLVEEVREVMPDDGIIALDNGIYKIWFARNYPARQPNTVLLDNALASMGAGLPSAMAAKLVHPNRKVVSICGDGGFMMNSQEIETAVRMNLDLVVLILNDSAYGMIKWKQEHMGLHDFGLDFKNPDFIKYAEAYGANGYRLEATEKLQPLMRDCMEKGGVHIIDVPVDYSRNVELLNEEIPKRAKAIQA

SEQ ID NO: 29644 - protein, 315 aa, Arabidopsis thaliana
MGRKRKHSETVTAAPVKDSAPERPQRTLLGWKDKKEDAENSKPAYASVFRNKEKVLVTCSRRINFRYRHLMLNMVSLLPHCKKDSKVEAKSSRGATLNELIELKGSSSCLFFECRKHKDLYMWMVKSPGGPSVKFLVNAVHTMEELKVTGNHLKGSRPLLTFSSNFENDAHWKLLKEMLTQIFGIPEGHRKSKPYHDHVFVFSIVDDHIWFRNYQISVPHNESDKIARGDLDKMTLIEVGPRFCLNPIKIFGGSFGGTTLYENPFYVSPNQIRALEKRNKAGKFAKKIKAKTRRKMHELSNPLEPDEFTDMWNDE

SEQ ID NO: 29645 - protein, 154 aa, Arabidopsis thaliana
  misc_feature (53)..(53): Xaa can be any naturally occurring amino acid
  misc_feature (149)..(149): Xaa can be any naturally occurring amino acid
ARNPGAAHTRPNRAKEEGNHQEVVWVSFMLSSAVGVTSPVKATMVVQLTGWKXSVEFPVTRRTNRAIISIEGNGGGVSCLKGWPPIGKKKLGTLFNLPDLRDVKWVKEVDYLFRTRGIPGVEFKWEHGFGYRGHGTTPGSYDGRSWTLXKLPLF

SEQ ID NO: 29646 - protein, 404 aa, Borrelia burgdorferi B31
MEEALMKDYNMIDSHTRRFDSTTNPTILKVIGAGGGGSNAVNRMIEYGVRDVEFIVANTDLQALQTSIAPIKIALGAKVTAGLGAGGKPEIGQAAAEEDIDVIRNHLSGADMVFITAGMGGGTGTGAAPVIAQVAKELGILTVGVVTKPFKFEGPKKLRLAEQGINNLRKSVDTLIIIPNQKLLTVVDKRTTIKDAFKRADDVLRMGVQGIAGLIIEHGEVNIDFADVKSIMQGQGDALMGIGYGKGENRAVDAATSAISNPLLEEVRIEGSKGLLVNVTGGDDFSLLELEEIMGIITVSVDDEATVIYGHAINSNLEDEIYVTVVATGFASKKQKEISSTPENNTLSSKEFDTLMSGNQNAPSGSYEQQDSSFAAKSKNVNYFDDDIDVPTFLRNLNKKSSDD

SEQ ID NO: 29647 - protein, 117 aa, Arabidopsis thaliana
MRNITTTTRKMLLLVITILLGIAYHGEAIACPQVNMYLAQCLPYLKAGGNPSPMCCNGLNSLKAAAPEKADRQVACNCLKSVANTIPGINDDFAKQLPAKCGVNIGVPFSKTVDCNR

SEQ ID NO: 29648 - protein, 623 aa, Xylella fastidiosa Ann-1
MRSPIMSNERTAQQSDIKQLISKGLEQGYLTYAEVNDHLPEDLVDPDQIEDIIGMINGMGIEVHEVAPDAETLLLNEGNTGNREVDDTAAEEAAAALSALDTEAGRTTDPVRMYMREMGTVELLTREGEIAIAKRIEEGLSEVQAALGAFPLSTELLLSEYELHKEGKRRLTEVVVGFNDLIEEDNSVTSAVDVTDESIVEVDEEDDDSVGNDEDAPMIGPDPAEVASRIESLSTEYAKFKKLYAKHGPEHKAVIKVREDVAAIFVTFKLSLPLTDLLVQQLQNTVNSVKDHERKVLHLATNVAKMPRKDFIRSWENNQTNLEWVEDAIKRKQKWSSALRDIKDQITAEQQASIDLEKANSLTLADIKEINRMMVYGEAKASKAKKEMVEANLRLVISIAKKYTNRGLQFLDLIQEGNIGLMKAVCKFEHRRGFKFSTYATWWIRQAITRSIADQARTIRIPVHMIETINKLNRISRQMLQQFGREATPEELAKEMDMPEDKIRKVMKIAKEPISMETPIGDDEDSHLGDFIEDPNVESPVDTTTNVNLSETVREVLAGLTPREAKVLRMRFGIDMNTDHTLEEVGKQFDVTRERIRQIEAKALRKLRHPSRSEQLRSFLDID

SEQ ID NO: 29649 - protein, 272 aa, Shigella flexneri
LMASHPGLVVELVPMVTRGDVILDTPLAKVGGKGLFVKELEVALLENRADIAVHSMKDVPVEFPQGLGLVTICEREDPRDAFVSNNYDSLDALPAGSIVGTSSLRRQCQLAERRPDLIIRSLRGNVGTRLSKLDNGEYDAIILAVAGLKRLGLESRIRAALPPEISLPAVGQGAVGIECRLDDTRTRELLAALNHHETALRVTAERAMNTRLEGGCQVPIGSYAELIDGEIWLRALVGAPDGSQIIRGERRGAPQDAEQMGISLAEELLNNG

SEQ ID NO: 29650 - protein, 377 aa, Euglena gracilis
MAEEIEQQALVCDNGSGMVKAGFAGDDAPRCVFPSIVGRRKNDSAMMGTAKKDAYIGDDAQAKRGILFIKYPIEHGIVTNWDDMEKIWHHTFFNELRVAPEDHPVLLTEAPMNPKSNREKMTQIMFETFNVPALYVSIQAVLSLYSSGRTTGIVLDCGDGVSHTVPIYEGYSLPHAVLRIDMAGRDLTDYMMKLLTERGLSFTTSAEREIVRDVKEKLCYVALDFDEEMSLATSSSSVEKEYELPDGNIIQVGSERFRCPEVLMKPSMIGLEACGVHETTFNSINKCDIDVRKDLYSNIVLSGGTTMYEGLPERMSKEITNLAPNSMKIKVVAPPERKYSVWIGGSILASLSTFQSMWIKKEEYDEAGPGIVHRKCF

SEQ ID NO: 29651 - protein, 396 aa, Oryza sativa (japonica cultivar-group)
MQMAAAAAAASTEAPAVAAAAPHHHHPHPHAHGMHPHAHHHIQAQPRWVVIPYPPPHGMVAAAPPPPPPQFVKHFAPPASVTPPPPQQAQQAQAAAAAAGGGSGGGNGDENRTIWVGDLQYWMDEGYLHNCFGPSGEHVMPNTDRAFKLNWASYSMGEKRAELASDHSIFVGDLAVDVTDEMLMDLFAKKYRSVKGAKVIIDANTGRSRGYGFVRFGDDNDKTHAMTEMNGAYCSTRPIRIGPATPRRSSGDSGSSPPRQSDSDSTNRTIYVGGLDPNATEDELRKAFAKYGDLASVKIPVGKQCGFVQFVNRPDAEEALQGLNGSTIGKQAVRLSWGRSPASKQSRGDSGHRRNGMYYGTPFYGGYGYASPLPHPNMYAAAYGAYPYYGNQQLVS

SEQ ID NO: 29652 - protein, 486 aa, Roseovarius nubinhibens ISM
MDGQMSKDELRHEGMRIGGEVVFTDEVIEVRYPYTNEVVGTVPAGRAEHAARAFEIAANYKPSFTRYERQQILFRAAELIRERRDWLAKWLTLELGICHQHALYETGRAYDVFTLAGQMAILDDGEVFSCDLTPQGKDRKIYTMREPVRAISAITPFNHPLNMVSHKIAPAIATNNCVVCKPTELTPLTAIALADILYEAGLPHEMFQIVTGWPKDIGDEMVTNENIDIITFTGGVPVGKMIAEKAGYKRTALELGGNDPLIVCNDLSDADLEKAATLAVAGSCGNSGQRCTAVKRILVQESVADRFVPMVVEKAKAIRFGDPQDPETQLGCVIHAEAAELFEKRVYMAQEQGAEILYHPGREGALLPPIVVDRVPHESELVMEETFGPIVPIVRVPDDDAEVMKISNGTPFGLSSGVCTNDLNRAIAYINGLNVGTCNIWEQPGYRIEMSPFGGIKDSGNGVKEGVLEAMKFFTNVKTYSLPWPR

SEQ ID NO: 29653 - protein, 329 aa, Arabidopsis thaliana
MASSIVTSSLKPLAMADSSSSTIFSHPSISSTISSSRIRSSSVSLLTGRINLPLSFSRVSLSLKTKTHLKKSPFVSFVAQTSDWAEEGGEGSVAVEETENSLESQDVSEGDESEGDASEGDVSEGDESEGDVSEGAVSERAEFPEPSEEAKLFVGNLAYDVNSQALAMLFEQAGTVEIAEVIYNRETDQSRGFGFVTMSSVDEAETAVEKFNRYDLNGRLLTVNKAAPRGSRPERAPRVYEPAFRVYVGNLPWDVDNGRLEQLFSEHGKVVEARVVYDRETGRSRGFGFVTMSDVDELNEAISALDGQNLEGRAIRVNVAEERPPRHGY

SEQ ID NO: 29654 - protein, 159 aa, Glycine max
MAASALYNAHMFLLPPLSHKTRKPFHSLCFNPPPSISIPRSKFYGATVAATKLPRRIFRGHGLVADDSGIAPEPESPYSEAGAGIDLNLPRRSLLVQFTCNLCGERTKRLVNRLAYERGAVFVQCAGCLRHHKLVDNLGLITEYDFREKINKDSETDQV

SEQ ID NO: 29655 - protein, 429 aa, Shigella flexneri 2a str. 301
MSDDKFDAIVVGAGVAGSVAALVMARAGLDVLVIERGDSAGCKNMTGGRLYAHTLEAIIPGFAVSAPVERKVTREKISFLTEESAVTLDFHREQPDVPQHASYTVLRNRLDPWLMEQAEQAGAQFIPGVRVDALVREGNKVTGVQAGDDILEANVVILADGVNSMLGRSLGMVPASDPHHYAVGVKEVIGLTPEQINDRFNITGEEGAAWLFAGSPSDGLMGGGFLYTNKDSISLGLVCGLGDIAHAQKSVPQMLEDFKQHPAIRPLISGGKLLEYSAHMVPEGGLAMVPQLVNEGVMIVGDAAGFCLNLGFTVRGMDLAIASAQAAATTVIAAKERADFSANSLAQYKRELEQSCVMRDMQHFRKIPALMENPRLFSQYPRMVADIMNEMFTIDGKPNQPVRKMIMGHAKKIGLINLLKDGIKGATAL

SEQ ID NO: 29656 - protein, 323 aa, Arabidopsis thaliana
VGLVPYYAMDPDTPISSAFSSHGIQWAAYLINLGAVMALCSALMGSILPQPRILMAMARDGLLPSYFSYVNQRTQVPINGTITTGVCAAILAFFMDVSQLAGMVSVGTLVAFTMVAISLLIVRYVVPPDEVPLPSPLLGVAPRLPGTSIRSKQPLLGKVDDSVVDKENAPGSWVLNKKNRRKFAGWSIMFTCIGNFLLSYAASSFLLPGLLRYSLCGVGGLFLLVGLIVLICIDQDDARHSFGHSGGFICPFVPLLPIVCILINMYLLVNLGAATWVRVSVWLFLGVVVYIFYGRRNSSLVNAVYVSTAHLQEIRRTSGHSLA

SEQ ID NO: 29657 - protein, 229 aa, Triticum aestivum
LYRLTSLYKKAGWYRSGIPGISSTHASANSQLPALLLSSEPARSPPQPPTPPPSTRTGNLAMAAASSATSVHDFTVKDASGKDVDLSVYKGKVLLIVNVASQCGLTNSNYTELSQLYPKYKDQGFEILAFPCNQFGGQEPGTNDEIVQFACTRFKAEYPIFDKVDVNGSNVSPLYKFLKSSKGGLFGDSIKWNFSKFLVDKEGHVVDRYAPTTSPLSIEKDIKKLLGSS

SEQ ID NO: 29658 - protein, 487 aa, Porphyra purpurea
MVNTQNQISQTSDLDYIVNQPYKYGFTTSVESEQFPRGISREVVKLISKKKNEPEYLLNFRLKAYEKWTKMKNPKWAHLKHPNIDFNSIIYYAVPKLKKELNSLDEVDPEILDTFNKLGISLNEQKRLSNVAVDAVFDSVSIATTFKKELAEAGVIFCSISEAIRNYPDLIQKYLGTVVPSGDNYFAALNSAVFSDGSFCYIPPDTVCPLELSTYFRINNEESGQFERTLIVADRGSKVSYLEGCTAPQYDTNQLHAAIVELIALDDAEIKYSTVQNWYAGNKDGKGGIYNFVTKRGLCSGKNSKISWTQVETGSAITWKYPGCILAGDNSQGEFYSVALTNNYQEADTGTKMIHIGNNTKSKIISKGISAGKSKNSYRGLVKIGPQSFNSRNYSQCDSLLIGQSSQANTFPYIQVQNPTAKVEHEASTSKISEDQIFYFLQRGINLEESVSLMISGFCKDVFNELPMEFAVEADRLLSLKLEGTVG

SEQ ID NO: 29659 - protein, 322 aa, Arabidopsis thaliana
MESTKIAPSFDRASELKAFDETKTGVKGLVDSGISKIPRIFHHSSVELANPKPLPSDLLHLKTIPTIDLGGRDFQDAIKHKNAIEGIKEAAAKWGFFQVINHGVSLELLEKMKDGVRDFHEQPPEVRKDLYSRDFGRKFIYLSNFDLYTAAAANWRDTFYCYMAPDPPEPQDLPEICRDVMMEYSKQVMILGEFLFELLSEALGLNPNHLKDMECLKGLRMLCHYFPPCPEPDLTFGTSKHSDGSFLTVLLPDNIEGLQVCREGYWFDVPHVPGALIINIGDLLQASLRNQYMFASSDFTSLFTMLDLFKKSSSWFKVFFFF

SEQ ID NO: 29660 - protein, 156 aa, Aeropyrum pernix K1
MPRWGYSVKLRDESEVAKAVLRNVPVHPKIMAEVARAISGMRVDEARRYLRAVIEKREAVPFRRAHGKQAHRRGLADKWGWPVGRYPVKAARYMLKLLDNVEANAANKNLDVERLKIIHVAAHKGITLKRWMPRAWGRATPRNRVHSHIEIMVREV

SEQ ID NO: 29661 - protein, 429 aa, Triticum aestivum
  misc_feature (302)..(302): Xaa can be any naturally occurring amino acid
MLPQQSQAAAMMQQAAAMQSMYAMPPPPHHHHLLGAAPPQQIEPILTGNLPPGFDTSTCRSVYVGNIHVQVTEALLREVFQSAGSVDGCKLIRKEKSSYGFVDYYERGSAALAILTLNGKQIFGQPIRVNWAYASGQREDTTDHFHIFVGDLSPEVTDSALFAFFSAYSPNCSDARVMWDQKTGRSRGYGFVSFRNQQDAQSAINDLNGQWLGNRQIRCNWATKGANSGEDQLTSDSKSIADVNNNFTENAKQKSNEDAPENNPLYRTVYVGNLAHEVTQDVLHRFFHALGAGAIEEVRVQXGKGFGFVKYSNHAETALAIQTGNGRILGGKPVKCSWGNKPTPPGTTSAPLPPPAAPSHPAAADLVAYQRAIAMSKMASTQALMQAQHLRHAAMGMGVGASQAMYDGTFQNVGASQQQQQQQQQLMYY

SEQ ID NO: 29662 - protein, 173 aa, Vibrio vulnificus
MEYNTSALCDIYMDQVDVVEPMFSNFGGRASFAGQITTVKCFEDNALIRETLEQDGVGRVLLVDGGGSLRRALLDGELAAIAEENEWEGIVVYGCVREVDELEDMNIGIQALASIPVGAAMQGVGEVDVPVNFGGVTFLPEDYLYADTTGIILSQEPLSADLEEDEEEPELLD

SEQ ID NO: 29663 - protein, 354 aa, Aspergillus oryzae
MVQQLPPQGGSRKISFNVSDQYEIQDVIGEGAYGVVCSAIHKPSGQKVAIKKITPFDHSMFCLRTLREMKLLRYFNHENIISILDIQRPRNYESFNEVYLIQELMETDMHRVIRTQDLSDDHCQYFIYQTLRALKAMHSANVLHRDLKPSNLLLNANCDLKVCDFGLARSAASTDDNSGFMTEYVATRWYRAPEIMLTFKEYTKAIDVWSVGCILAEMLSGKPLFPGKDYHHQLTLILDVLGTPTMEDYYGIKSRRAREYIRSLPFKKKIPFKALFPKANDLALDLLERLLAFNPAKRITVEEALRHPYLEPYHDPEDEPTAPPIPEGFFDFDKNKDALSKEQLKILIYEEIMR

SEQ ID NO: 29664 - protein, 377 aa, Cyanidioschyzon merolae strain 10D
MTEEEITALVIDNGSGMVKAGFAGDDAPRAVFPSIVGRPRHQAVMVGMGQKDSYVGDEAQSKRGILSLKYPIEHGIVTNWDDMEKIWYHTFYNELRISPEDHPVLLTEAPLNPKANREKMTQIMFETFNVPAMYVAIQAVLSLYASGRTTGIVVDSGDGVTHTVPIYEGYALPHAIMRIDLAGRDLTDYLAKILTERGYSFTTTAEREIVRDIKEKCCYVAQDYDHELEIASSQPAKIDKQYELPDGQIITIGSERFRCPEVLFQPSLIGMEGEGIHNVAYQSIMKCDVDIRKDLYANVVLSGGTTMFPGIADRMQRELASVAPSSVKIKLVAPAERKYSVWIGGSILASLSTFQQMWISKAEYDEFGPSVVHRKCF

SEQ ID NO: 29665 - protein, 448 aa, Geobacter sulfurreducens PCA
MSGADYCPNSPEEVRRMLDAVGVADIDDLFRPISPALRAKSFDLPPGMSEFEMLHRLQTLAGRNAQGLVHFVGGGFHDHLIPAVVDHLASRPEFYTAYTPYQPECSQGTLQALFEYQTAICRLTGMEVANASLYDGGTALAEAALMALRITGRSRLVVDGAVNPFHREILATYLANLDVELVEIAPKAGMEDDARLRAAIDDATAAVIVQNPDFFGTLSDLSGLAAEAHGVGALLVASVYPISLGLVRSPGSMGADIVVGDGQSLGNPLSFGGPSFGFIAGRREHIRNLPGRIIGETVDRNGARGFVLTLQAREQHIKRHKATSNICSNQSLCALRGLIFLSALGSEGMAELARLNRDKAEYAKAVLGAVPGVEVLNSGFTFNEFTVCLPKVAEEAVVALLRKGVAAGVPLGPYYPDMEKCMVVTVTERRTRAEIDAFARQLEGALWN

SEQ ID NO: 29666 - protein, 514 aa, Methanococcus maripaludis S2
MESYLNSNEIIKNSLKSMKLPEKVRVFDTTLRDGEQTPGVSLMPDQKMDIAKNLSEIGVDAIEAGFPVSSEGEQESIKNITSLGLDAEICGLARAVKKDIDVAIDCGVDSIHTFIATSPLHREYKLKMSKEKIIDIAVESIEYIKEHGVIVEFSAEDATRTELDYLKEVYKKAVEAGADRINVPDTVGVMVPNSMSYLIKELKNDIKVPISVHCHNDFGIAVSNSVAAVEAGAEQVHCTVNGLGERAGNASLEETVMTLNMVYGINTNVNTKMLTKLSKLVSHYTGIKTQPNKAIVGENSFAHESGIHAHGVLANALTYEPIDPEIVGNRRRIVLGKHSGAHAIKSKLSEIGVEVGEIVSEEQFCEIVERVKAIGDKGKIVTDADVMAIAEDITKRTLKSERIVDLEQFAVITGNHVLPTASVALKVKDKIYKTSELGVGPVDAALKAIQAAVGENIRLNEYNISAISGGTDAIAEVTVRLENQEKEVIAKATGDDVVKASVEAVIDGINKLMG

SEQ ID NO: 29667 - protein, 481 aa, Geobacter sulfurreducens PCA
MELIFEKSVTGRRGVRLPASDVPPAPPLSAVLARDGAPDLPQVSELDVVRHFTTLSRRNFSVDTHFYPLGSCTMKYNAKALEEAAKLFAPYHPMVPLLPHGASFSQGSLGLVHGLGEALAEITGMDEVTCQPLAGAHGEMTGIMLIAAYHEAKGNRKKYVVVPDSSHGTNPASAAMVGYEIITVPTAPYGDMDLEKYRAVMTDEVAAVMMTCPNTLGLFNPHIREICDIAHDHDALMYYDGANLNAILGKVRPGDVGFDVIHVNLHKTFGTPHGGGGPGSGPVGVKKLLASYLPGPRVVKNSDGDYSVIPHSHESIGRTAGFFGNFGVMAKAFAYITMLGREGLIQVSEQAVLNANYIMARLKDVYDLPYDQTCMHECVFSAARQARNGVHAIDIAKFLIDRGFHPPTVYFPLIVKEAIMIEPTETESKETMDAFIEAMRDAADLAERNPAAFAELPRTMPITRPDETKAAREQNVCYFGC

SEQ ID NO: 29668 - protein, 263 aa, Pseudomonas fluorescens Pf-5
MNFTTILFSISEGVALLSLNRPEQLNSFNPTMHREVQAALDLVRNDPQVRVLLLTGEGRGFCAGQDLGERTVAPGGAAPDLGASIETFYNPLVRALRDLPLPVICAVNGVAAGAGANLPLACDLVLAARSASFIQAFCKLGLVPDSGGTWLLPRLVGMARAKALALLGNRLSAEQAEQWGLIYQCVDDAQLRDQALSLARHLATQPTYGLGLIKRSLNASLHNSFDEQLDLERDLQRLAGCSEDYREGVSAFMEKRSPVFKGC

SEQ ID NO: 29669 - protein, 273 aa, Staphylococcus aureus
GTPYKESDIEPYYTDIRHGKRPSEEELQDLKDRYEFIGGLSPLAGTTDDQADALVSALNKAYADVEFKLYLGLKHISPFIEDAVEQMHNDGITEAITVVLAPHYSSFSVGSYDKRADEEAAKYGIQLTHVKHYYEQPKFIEYWTNKVNETLAQIPEEEHKDTVLVVSAHSLPKGLIEKNNDPYPQELEHTALLIKEQSNIEHTAIGWQSEGNTGTPWLGPDVQDLTRDLYEKHQYKNFIYTPVGFVCEHLEVLYDNDYECKVVCDDIGANYYR

SEQ ID NO: 29670 - protein, 508 aa, Escherichia coli CFT073
MWLWRKLWGIGGTMSRNTEATDDVKTWTGGPLNYKEGFFTQLATDELAKGINEEVVRAISAKRNEPEWMLEFRLNAYHAWLEMEEPHWLKAHYDKLNYQDYSYYSAPSCGNCDDNCASEPGAVQQTGANAFLSKEVEAAFEQLGVPVREGKEVAVDAIFDSVSVATTYREKLAEQGIIFCSFGEAIHDHPELVRKYLGTVVPGNDNFFAALNAAVASDGTFIYVPKGVRCPMELSTYFRINAEKTGQFERTILVADEDSYVSYIEGCSAPVRDSYQLHAAVVEVIIHKNAEVKYSTVQNWFPGDNNTGGILNFVTKRALCEGENSKMSWTQSETGSAITWKYPSCILRGDNSIGEFYSVALTSGHQQADTGTKMIHIGKNTKSTIISKGISAGHSQNSYRGLVKIMPTATNARNFTQCDSMLIGANCGAHTFPYVECRNNSAQLEHEATTSRIGEDQLFYCLQRGISEEDAISMIVNGFCKDVFSELPLEFAVEAQKLLAISLEHSVG

SEQ ID NO: 29671 - protein, 268 aa, Brucella melitensis biovar Abortus
MWDGMGNKMSEATDVVIETRPADGVALLELNRPDALNAVNMDVRQKLAASADSLVEDPDIRVIVIAGRGGNFAAGSDVKVFAQTGAGSLLAQRMHRYWESLAHCPKPVIAAVEGYALGGGCELAMHADIIVAARTASFGQPEIKLGLMPGAGGTQRLLRAIGKYKTMLLALTGEMLPATEAEKYGLVSRLSEEGEALEEALKLARKIALMPALAAEQIKEAVMYGEDAPLETALRLERKAFQLLFDTEDKREGIDAFLTKRKPAFKGR

SEQ ID NO: 29672 - protein, 87 aa, Zea mays
GRHTYKGVPHLKEDETPPQGGTPGWAAIPSPRIGPWLRLMQKIAVEQGLVPEFEVRFEATHHGPVTSTPTMFVEIRMCLCTSFFWFL

SEQ ID NO: 29673 - protein, 273 aa, Staphylococcus aureus
GTPYKESDIEPYYTDIRHGKRPSEEELQDLKDRYEFIGGLSPLAGTTDNQADALVSALNKAYADVEFKLYLGLKHISPFIEDAVEQMHNDGITEAITVVLAPHYSSFSVGSYDKRADEEAAKYGIQLTHVKHYYEQPKFIEYWTNKVNETLAQIPVEEHKDTVLVVSAHSLPKGLIEKNNDPYPQELEHTALLIKEQSNIEHIAIGWQSEGNTGTPWLGPDVQDLTRDLYEKHQYKNFIYTPVGFVCEHLEVLYDNDYECKVVCDDIGANYYR

SEQ ID NO: 29674 - protein, 250 aa, Medicago truncatula
MNSSASVPRSTVLCYSTFTSETDAGQPSRDNNGLNKEELDDEFDDFLGGRPELQLQGVDPSRGWGFRGVHKAIICGKVGQAPVQKILRNGKNVTIFTVGTGGMYDQRIVGSKDLPKPAQWHRIAVHNEVLGAYAVQQLFKNSSVYVEGEIETRVYNDSINGEVKSIPEICVRRDVVASFVSILPFIRLEASSSPLLCLGFGRVGTLQWRNIGCTGLFLHSEGKLRLIRSGESVDKTSLDEFNVYIDEEIV

SEQ ID NO: 29675 - protein, 651 aa, Brucella melitensis biovar Abortus
MSVLKTDDQINGTHRAHHQVLTKLINAQTPSDFDILQSDFTDGMHDAVYRLMAEIMGLNTGYCGGRGGSMHMRDAASGIAGTSAIVGGNIPHAAGYALADKILNRKGISVAFFGDGASLQGATYEAMNIAALYRLPVIFYVENNLYAVSTHIQDATRETRIASRGPMLGFTGIECDGMDILSVHQAMREACRIIEEEGGPVVIEAQCYRYLHQSGSKSGSDFGYRTREEEEEWKSRDPIALAERRLKELGIAGDAEFLKIDERVTAAVQAAGERLTETAAGSNVLRIPDALWPSASSVDDGILGDGSEFSGAEFREIEDYQPDELEKMRFAAAASDVLGRAMEKDPTIIVMGEDVHRFAGGVSGFTRNALELFPDRVLAMPIAENGFTGVALGAALRGLRPVVEIMFGDFCFVAADQIANGISKVRHMFGDGFPVPIVMRVRVSPHTGYGSQHSGDPSALFGMFPGWRVVSPTNAFDYIGLMNSALKSDDPVAVIEHVEFYQRESLVPRNDRDYCIPLGKAKIVRPGSACTVLATSVMVQASIKAAEEAGIDAEIIDMRSLDMFGIDWALIGASIGKTNRVVIAEQVASGLSLGRHWIAEIQKRFFNDLDHEVLHVTGSMASPVVSLVLNKAALGSADKVRSALEQITHSA

SEQ ID NO: 29676 - protein, 396 aa, Ralstonia metallidurans CH34
MAKEKFERTKPHVNVGTIGHVDHGKTTLTAAIATVLAAKFGGAAKKYDEIDAAPEEKARGITINTAHVEYETANRHYAHVDCPGHADYVKNMITGAAQMDGAILVCSAADGPMPQTREHILLARQVGVPYIIVFLNKCDMVDDAELLELVEMEVRELLSKYEFPGDDTPIIKGSAKLALEGDKGELGEVAIMNLADALDTYIPTPERAVDGTFLMPVEDVFSISGRGTVVTGRIERGVIKVGEEIEIVGIRPTVKTTCTGVEMFRKLLDQGQAGDNVGLLLRGTKREDVERGQVLCKPGSIKPHTHFTGEVYILSKDEGGRHTPFFNNYRPQFYFRTTDVTGSIELPQDKEMVMPGDNVSITVKLIAPIAMEEGLRFAIREGGRTVGAGVVAKILD

SEQ ID NO: 29677 - protein, 283 aa, Bacillus subtilis
MTATIIDGKETAREKREQLAKEVEELKKQGVTPGLAVILIGDDPASHSYVRGKKKAAETMGMNFKLDQFDSSLTEAELLSIIDQYNQDPEFHGILVQLPLPDHISEKAVIERISPDKDVDGFHPLNVGKMLLGEDTFLPCTPHGIVELLKKTNIDLSGKEVVVVGRSNIVGKPVGQLLLNENATVTYCHSRTENITEHTKKADILVVAVGRANFISADQIKEGAVVIDVGVNRLENGKLCGDVEFEGAKEKASFITPVPGGVGPMTITMLAHNTVKSAKRTLS

SEQ ID NO: 29678 - protein, 382 aa, Bacillus subtilis subsp. subtilis str. 168
MLEFETNIDGLASIKVIGVGGGGNNAVNRMIENEVQGVEYIAVNTDAQALNLSKAEVKMQIGAKLTRGLGAGANPEVGKKAAEESKEQIEEALKGADMVFVTAGMGGGTGTGAAPVIAQIAKDLGALTVGVVTRPFTFEGRKRQLQAAGGISAMKEAVDTLIVIPNDRILEIVDKNTPMLEAFREADNVLRQGVQGISDLIATPGLINLDFADVKTIMSNKGSALMGIGIATGENRAAEAAKKAISSPLLEAAIDGAQGVLMNITGGTNLSLYEVQEAADIVASASDQDVNMIFGSVINENLKDEIVVTVIATGFIEQEKDVTKPQRPSLNQSIKTHNQSVPKRDAKREEPQQQNTVSRHTSQPADDTLDIPTFLRNRNKRG

SEQ ID NO: 29679 - protein, 255 aa, Escherichia coli K12
MSELIVSRQQRVLLLTLNRPAARNALNNALLMQLVNELEAAATDTSISVCVITGNARFFAAGADLNEMAEKDLAATLNDTRPQLWARLQAFNKPLIAAVNGYALGAGCELALLCDVVVAGENARFGLPEITLGIMPGAGGTQRLIRSVGKSLASKMVLSGESITAQQAQQAGLVSDVFPSDLTLEYALQLASKMARHSPLALQAAKQALRQSQEVALQAGLAQERQLFTLLAATEDRHEGISAFLQKRTPDFKGR

SEQ ID NO: 29680 - protein, 670 aa, Oryza sativa
MAIHGVFIALLLLSAVISVLCLLAVLVPDAGGRHHRHGCPPFTCGNLSSVSSPFRRRGDPSECGVLSYELNCADDKATIQIDNGTYYVTGINYTDSTFLIVDADISDSPSSCPLPRWNSLREPRFQVLWTRIASFVNCSQEIKNSSWIMYMPVACLSTSRSFVYVLTGQNPALIQSLEPSCGYLAMTPLGGRDSVAPVNESLSLSYADVVKSMRKGFRVQFPFRYSFKQCPMDSIPTGKTNWFGTILSADTNFQLCIPVHQIPSRYRMPLGIMLYVIAYAFQIWKMIAATCRFLLTPLAVLVFLAHKYWKTRVTIDAVEKFLRMQQMLGPTRYAYTDITAITGHFREKLGQGGYGSVYKGVLLPGDLHVAVKMLNGNSNCNGEEFISEVATIGMIHHVNVVRLVGFCSEEMRRALVYEHMPRGSLDKYIYLSERSFSWDKINEIALGIARGINYLHQGCDMQILHFDIKPHNILLDDNFVPKVADFGLAKLYPRDKSFVPDRALRGTVGYMAPEMVSRSFGVISSKSDVYSFGMLLLEMAGGRRNVDPNADSSKSKAYYPSWVYDQLIADQQFDEISNVANMHELERKLCLVGLWCIQMKSHDRPTMSEAIEMLEGGVDALQVPPRPFFCDGDGIGNGMPPPQVMDSYFHSSKLTAISEEGDGIAKLASS

SEQ ID NO: 29681 - protein, 262 aa, Escherichia coli K12
MMEFILSHVEKGVMTLTLNRPERLNSFNDEMHAQLAECLKQVERDDTIRCLLLTGAGRGFCAGQDLNDRNVDPTGPAPDLGMSVERFYNPLVRRLAKLPKPVICAVNGVAAGAGATLALGGDIVIAARSAKFVMAFSKLGLIPDCGGTWLLPRVAGRARAMGLALLGNQLSAEQAHEWGMIWQVVDDETLADTAQQLARHLATQPTFGLGLIKQAINSAETNTLDTQLDLERDYQRLAGRSADYREGVSAFLAKRSPQFTGK

SEQ ID NO: 29682 - protein, 405 aa, Rubrivivax gelatinosus PM1
MAIEMIEEFELGTKIKVIGVGGGGGNAVEHMINEGVQGVEFICANTDAQALHRSKADQLIQLGSTGLGAGSKPAAGKAAADEAEGRIRDAIAGANMIFLTAGMGGGTGTGAAPVIARVAKEMGILTVGVVTKPFDFEGGRRMKQAEAGLQELEANVDSLIVVLNEKLLEVLGDDVSQDQAFKQANDVLKNAVGGIADIIHIDASINVDFEDVKTVMSEPGKAMMGTAIATGPDRANKAADSAVACPLLEGIDLSGARGVLVLIAASRASLKLSESKNAMNTIRRYAAEDAHVIFGAAYDESLGDQLRVTVIATGLAPARRVQAPMTVVHNATLQRTGTDNIPVLNQPLHTQGGLSAAPTQHDYAGMQVPSVWRSGRTQAAAKVDALASNGMDEIEIPAFLRKQAD

SEQ ID NO: 29683 - protein, 672 aa, Oryza sativa
MAIPGSFCHPTALQVFVSVQFVFAVLVPHAAGRHHRHGCAPFSCGHLSDVSPPFRRRGDPPECGVASYELTCTDDKPATIQIDNGTYLVMDIKYKDSTFWVIDANISDSRNNCPLPRWNRDFGYYDQMLYERHGEDSRRRSIQAELMPPYQSTTATFVTCSPGKHLEGANGKVQAWLLAWSTNSSLRLRATGMNSDSIGSLEPSCGYLAMTPLGAGDRPLVLENASYADVVKLMRGGFAIRFPYTSRFYGYSSKIKQCIAQSFQIFYTVIFDYHFWGCLLLHPVVQLNVGVIPLAMWTLKWIAVFCRFILVPLVILTFLARNYWKIRITTDAVEKFLRMQLMNGPTRYAYTDLIAITGHFREKLGQGGYGSVYKGVLLPGNAHVAVKVLGNSNCNGEEFISEVSTIGMIHHINVVHLVGFCSEEIRRALVYEYMPRGSLDKYIFSSERSFSWDKLNEIALGIARGINYLHQGCDMQILHFDIKPHNILLDVNFVPKVADFGLAKLCPRDQSFVPLSALRGTIGYIAPEMISRSFGIISSKSDVYSFGMLLLEMAGGRRNSDMYAENSNQTYFPSWVYDQLTEQQVGVGEIPAGTVANMHELERKLCIIGLHCIQMKSHDRPTMSEVIEMLEGGVVGLQMPPRPFFCDDEPVSLAVNSHQFSSELSEILEEDE

SEQ ID NO: 29684 - protein, 312 aa, Campylobacter jejuni subsp. jejuni NCTC 11168
MLDVAIIGGGPAGLSAGLYATRGGLKNVVMFEKGMPGGQITSSSEIENYPGVAQVMDGISFMAPWSEQCMRFGLKHEMVGVEQILKNSDGSFTIKLEGGKTELAKAVIVCTGSAPKKAGFKGEDEFFGKGVSTCATCDGFFYKNKEVAVLGGGDTALEEALYLANICSKIYLIHRRDEFRAAPSTVEKVKKNEKIELITSASVDEVYGDKMGVAGVKVKLKDGSIRDLNVPGIFTFVGLNVRNEILKQDDSKFLCNMEEGGQVSVDLKMQTSVAGLFAAGDLRKDAPKQVICAAGDGAVAALSAMAYIESLH

SEQ ID NO: 29685 - protein, 104 aa, Campylobacter jejuni subsp. jejuni NCTC 11168
MGKYIELTSDNFAQAKEGVALVDFWAPWCGPCRMLAPVIDELSNDFDGKAKICKVNTDEQGDLAAEFGVRSIPTLIFFKNGEVVDQLVGAQSKQAISDKLNSLL

SEQ ID NO: 29686 - protein, 564 aa, Xanthomonas campestris pv. campestris str. ATCC 33913
MCSIFGIFGLQPGDDLQALRRQALECSQRQRHRGPDWSGVYVDAGAILVHERLAIVDPAGGSQPLLSEDGSLALAVNGEIYNHRELKAELLQPYAFQTGSDCEVINALYREDAPASYLNRLNGIFAFALWDKAAGRVIIARDPIGVVPLYWGHDREGRLRVASELKSLVDDCADAAQFPPGHWYDSATGALSRYYERSWREYSEVENVQVPLQELREAFERAVHRQLMTDVPYGVLLSGGLDSSLVAAVAARYARHRIEENDTTEAWWPRLHSFAIGLTGSPDLAAAEVAAAALGTVHHGFEYSFEEGLDALPEVIRHIETYDVTTIRASTPMFLLARRIKAMGVKMVLSGEGSDEIFGGYLYFHKAPNAREFHEELVRKLDALNNYDCLRANKSMMAWGVEPRVPFLDREFLDVAMRMDARFKMIDKTSTGATRIEKGILREAFAGYLPESILWRQKEQFSDGVGYGWIDGLKAHAAAHVSDRELAAADRRFPVNPPQTKEAYFYRSLFEQFFPSQAAAETVPGGKSIACSSPTAIAWDASFAAMADPSGRAIAGVHAQALAS

SEQ ID NO: 29687 - protein, 485 aa, Oryza sativa
LEPSCGYLAMTPLDGMGRVAPAVDSLSYEDVVKFMRKGFRVQFPFRHHRNRSFKDCLMESIPKSTGIGKLSDWFSLSVTENFVDCATAKIPSPYNILLGIILYALMFWTMLAPPCRYLLAPLVVLIFLAQKFLIRMITIDAVEKFLRMQQMLGPTRYAYTDIIAITGHFREKLGQGGYGSVYKGVLLPGDLHVAIKILNGYSNCNGEEFISEVATIGRIHHVNVVRLVGFCSEGMGRALVYEYMPRGSLDKHIFSSERRFSWDKLNEIALGIARGINYLHQGCDMQIIHFGIKPHNILLDDNFVPKVADFGLAKLYPRDKSFVSDRALRGTVGYMAPEMVSRSFGIISGKSDVYSFGMLLLEMVGGRRNADPNADSSASKAYYPSWVYDKLIADQQVDEISNFANMHELERKLCLVGLWCIQMKSHDRPTMSEAIEMLEGSVDALQVPLRPFFCDGDGMPPPQVMDSYFHSSDLSAISEEDVWNS

SEQ ID NO: 29688 - protein, 647 aa, Xanthobacter autotrophicus Py2
MPPVCRETVPNAPHMALWLAQYSNPPAPAAPPMTVHHKTPHAFKAVFQTFDDLADSAAGPARLAALRAELARLNVDGYVVPRADAHQNEYVPACEERLAFLTGFTGSAGTVIVLEDTAALFVDGRYTLQAPAQVDTAAFTVVPLSQTRPEAWVEANLARGARLAFDPWRTTIDGRDRLAKAVGAAGGILVPLEADPFTAIWPDRPEPPRAPVRLLDLSVAGEDTAAKLLRVQEKLTEAKLDGALISDPHGAAWLFNMRGGDVAHTPLPLAWCIVPREGLPDLFLEPLKLSHEVRAALAGHARLHGTGDLDTVLAAFAKDRKVRLDQATAPVRLAGLIEAAGGTVDKGADPIALLKASKNPAEIAGMRAAHVRDGLALARFLAWFDAEAPKGHLTEIEAVEALETFRRGTGNLTDVSFPTIAGAGENGAIVHYRVTRKTNRAIHPGELFLLDSGAQYPDGTTDITRTLAVGTPTAEMRRHYTLVLKGHLALSRAVFPQGITGAQLDPLARQYLWAAGLDFDHGTGHGVGAGLSVHEGPARISQLGHLALAEGMILSNEPGYYRTGAYGIRIENLILVEQRTVEGGEKPCLGFSTLTLVPYDRRLIDLGLLDGAEREQVDAYHALVAEALAGDLNEVERNWLAQATAPL

SEQ ID NO: 29689 - protein, 367 aa, Rhodobacter sphaeroides 2.4.1
MSHSKTEYSDAISSIEEIIDDARNGRMFILVDHEDRENEGDLVIPAQMCTPAAINFMATHGRGLICLALPSARIDQLGLHLMTPKNSSRHETAFTISIEAREGVTTGISAADRARTVAVAIDPSKGPADIATPGHVFPLRARDGGVLVRAGHTEAAVDVSRLAGLNASGVICEIMNDDGTMARLPDLVAFAQRHGLKIGTISDLIAYRRRHDNLVKEKAVKHVTSCYGGDWLMRIFSDDTQGAEHVILSKGNVTDGEPVLVRMHALNPLEDVLGIGPAHAGDLHGAMRLIAQEGRGVVVLLRDVTMKLPMDDEASPQTLRQYGLGAQILSALGLSQIVLVTNSRAPKVVGLEAYGLSIVGTHHISEV

SEQ ID NO: 29690 - protein, 430 aa, Corynebacterium efficiens YS-314
MTSPNNYLAKIKVVGVGGGGVNAVNRMIEEGLKGVEFIAVNTDSQALMFSDADVKLDIGREATRGLGAGANPEVGRTSAEDHKNEIEETIKGADMVFVTAGEGGGTGTGAAPVVAGIAKKMGALTIGVVTKPFEFEGRRRTRQAEEGIAALKEVCDTLIVIPNDRLLELGDANLSMMEAFRAADEVLHNGVQGITNLITIPGVINVDFADVRSVMSEAGSALMGVGSSRGDNRVVAATEQAINSPLLEATMDGATGVLLSFAGGSDLGLMEVNQAASMVRERSDEDVNLIFGTIIDDNLGDEVRVTVIATGFDAARAHASQERRTADAGAPANETSTPAPAPASEPATPAPSNESIFGGTREADPYESRSAGARHRIDDSRSGGLFTRGDEREFRRDDRRDDRRDDRRDDRRDDHRRDNGDDLDVPSFLR

SEQ ID NO: 29691 - protein, 362 aa, Wolbachia endosymbiont of Drosophila ananassae
MVTDRVALLLCLLHLLLLYALQFCLFHPKNTIPSLLTRSMASLIILSSSISLSLSSLINISRASFTFTVIVFVFLLPLNILPIISVTFITPTCPPGMPGISKVGNILLLSLTLIETSPSSNSLFLNLSLKIFLLSSVAFSPTIEFTIVFSAKIKAFLAKALRAFSLTKTIAASTKSRIIESTSRPTYPISVNFVASIFMNGLLAHINAHIRDGVAVTNFLYWLENNVGTELEAEEKILEYRKEQNLFKQLSFPTISAFNENGAIIHYRASSKTNKVIQKDGLYLIDSGGQYLDGTTDVTKTVAIGNPTDEQITHYTIVLKAHIAIASVIFPPGTTGGELDILARTHLWKFGMDYMHGTGHGV

SEQ ID NO: 29692 - protein, 437 aa, Zea mays
MGLAVAVGRRPTQRSGVSRSRCAGKRPTAAEPRHHRHRTEGRKERNPGGSRRYQRPDSDASRAGEADHTRTRTLSTALLRYAPSRPDRTGPTFLHLSARRRPTRMGAGTNNGLSNGAAAGQRADDGTTVFRGTAYSPLRTTVALALWLGAIHFNAFLVLASLFLFPRRVAALVLATQLFFMFLPLSDKSRLGRKIARFISKYVIGYFPVTLHLEDYGAFDPNRAYVFGYEPHSVLPIAVGILGDLVGFMPLPKMKILASSAVFYTPFLRQIWTWLGLAPASRKSFYSYLGAGYSCIIVPGGVQEILHMDHDSEVAFLKPRKGFVKIAIEMGCPVVPVFAFGQSYVYKWWRPGGKLIVKIARAIKFSPIIFWGKLGTPIPFATPMHVIVGRPIEVVKNPQPTIDEINQVHGQFVVAMQDLFEKYKSRTGYPDLQLRVL

SEQ ID NO: 29693 - protein, 272 aa, Shigella flexneri
LMASHPGLVVELVPMVTRGDVILDTPLAKVGGKGLFVKELEVALLENRADIAVHSMKDVPVEFPQGLGLVTICEREDPRDAFVSNNYDSLDALPAGSIVGTSSLRRQCQLAERRPDLIIRSLRGNVGTRLSKLDNGEYDAIILAVAGLKRLGLESRIRAALPPEISLPAVGQGAVGIECRLDDTRTRELLAALNHHETALRVTAERAMNTRLEGGCQVPIGSYAELIDGEIWLCALVGAPDGSQIIRGERRGAPQDAEQMGISLAEELLNNG

SEQ ID NO: 29694 - protein, 272 aa, Escherichia coli
LMASHPGLVVELVPMVTRGDVILDTPLAKVGGKGLFVKELEVALLENRADIAVHSMKDVPVEFPQGLGLVTICEREDPRDAFVSNNYDSLDALPAGSIVGTSSLRRQCQLAERRPDLIIRSLRGNVGTRLSKLDNGEYDAIILAVAGLKRLGLESRIRAALPPEISLPAVGQGAVGIECRLDDARTRELLAALNHHETALRVTAERAMNTRLEGGCQVPIGSYAELIDGEIWLRALVGAPDGSQIIRGERRGAPQDAEQMGISLAEELLNNG

SEQ ID NO: 29695 - protein, 631 aa, Gloeobacter violaceus PCC 7421
MLPRGSLSVAPLDTVRSDGAARVRERLACLRRLLADRQLDGYLVNSTDEHLSEYLPEARARRAWLSGFTGSAGEVLVGLEQSWLFVDSRYWEQADQQVDGQAMGVCKLGLAGHKGPIQTLKDLGQLRRASGTPFRLGLDPLAIAVEQWRTFERQLRPVGVEVVAVAGNLVDRVRAELEGGLPSLWSERPVFAVSEAVAGQSAVQKLAAVRAEIERAGATVLPVTRLDQVAWLLNLRGWDVPFNPVFIAYAVVTRTESYLFTAPERLDGGVRAALPAEVNILPYEAYGETLARLTADGTAAVLVDIRQTTMGTLGGLGGAAVVEADHPIEKLKAHKNTAEIASMQRANLQASRAKTRALGEVMRRFAAGETVSEQDAAEAVERYYREEPDFQGLSFTPIAGIGAHSSIVHYSTPDPGSAMTPGALLLLDSGAQYTGGTTDDTRTVVAGTPDPEQVRCYTEVLKAQINCAAQRFPKGTTGAQLDGITRASLWCAGLEYGHGTGHGVGAFLSVHEGPVGLNKCAREELQPGMVTSIEPGYYRPGWGGIRIENLYVVREVENADGIVWYGFEPLTFIPFDARLVDLGRLDDRQRAWLAHYNRTVYERLSPDLDLEEVRWLAQQCRFGLESSAVAQ

SEQ ID NO: 29696 - protein, 272 aa, Escherichia coli
LMASHPGLVVELVPMVTRGDVILDTPLAKVGGKGLFVKELEVALLENRADIAVHSMKDVPVEFPQGLGLVTICEREDPRDAFVSNNYDSLDALPAGSIVGTSSLRRQCQLAERRPDLIIRSLRGNVGTRLSKLDNGEYDAIILAVAGLKRLGLESRIRAALPPEISLPAVGQGAVGIECRLDDARTRELLAALNHHETALRVTAERAMNTRLEGGCQVPIGSYAELIDGEIWLRALVGAPDGSQIIRGERRGAPQNAEQMGISLAEELLNNG

SEQ ID NO: 29697 - protein, 922 aa, Aspergillus nidulans FGSC A4
MASAGPATADGGAGHSHAASGHHLHATNVQSKRRTMIATPTGQWSLGKTLGAGSMGKVKVGKHLETGEQVAIKIVPRQSTEEHRSQREAERADRSKEVRTAREAAIVSLVNHPYICGMRDVVRTNYHWYMLFELVNGGQMLDYIISHGKLKEKQARKFARQIASALDYCHRNSIVHRDLKIENILISKTGDIKIIDFGLSNLFSPRSLLKTFCGSLYFAAPELLQARQYTGPEVDVWSFGIVLYVLVCGKVPFDDQSMPKLHAKIKSGVFEYPPGLTAECRHIISRMLVTDPKQRASLTEIMNHPWMNKGFSGPPDNHLPHREPLQLPLDPEVIEKMTGFEFGKPEYITAQLTKIIESEEYQHAIALNAREHPVPAHTDKKRGVFDFYKRRNSASRDTLSAPSAEAVQLGNDPLNAYSPLLSVYYLVKEKLDRERSESNPGALSIAQAPGDMLQVPDLAPPEAAHTNQYQVPGEKDTGRRSRPRARTHGDDEITEGMKNASLAPNHAQASHSPAASQPDTPAKKESTAAGLLRRFSTRRTKDRSRDRERSRLASPHQPSLNVQPPADSASPLSRGFSMRKNRRTEPSATAIPSTGSQPQHQDLLKTPGSVEPASRSNKYLERSISVSSGEPRHRRSRRTEGDSGSQPPQTSGSEYSAVPKDSTAGREQKIAPRTHASRTMSLGHARRESIQARRARRDAAREANVPEETDGEISGPGAALESANEEDLSKPVYLKGLFSVSTTSSKPLAFIRADIIRVLKQLAVDYVEIKGGFSCRHAPSIELDKVVDNGPPSPERQGQVSNHRRRISLGGLLNHDDGREELARTTTRRRHRAPDRSFVSNSEVSDEYLETRDTTVTSGERVVGETTTRVQSDTGGNLVLRFEILIVKVPLFSLHGIQFKKVSGGMWQYREMAKKILDALRL

SEQ ID NO: 29698 - protein, 527 aa, Triticum aestivum
MALEAAFHYLQLAGIHGTSTPAVLLTILLLLIIRLAWVRTTTASTRFGKQQQLPPSPPGKLPIIGHLHLLGSQTHISIRDLDAKHGRNGLLLLRIGAVPTLFVSSPSAAEAVLRTHDQIFASRPPSMAADIIRYGPTDIAFAPYGEYWRQARKLLTTHMLSAKVVHSFRHGRQEEVRLVINKIHEAATRGTAVDMSELLSGYTNDVVCRAVLGESHRKEGRNRLFSELTEINVSLLGGFSLENYIPPNMVMADVLLRLVSVKARRLNKRWDELFNEIIEEHLHPSKPSSGDQQAVDFIDLLLSLKEEYGLTTDNIKAILVDMFEAGIETSYLTLEYGMAELMNNRHILKKLQEEVRSQGKKLDMITEEDLGSMAYLRATIKETLRLHPPAPFLLPHFSTADCKIDGYLIPSNTRVLVNAWALGRDPSSWERPEDFLPERFLQDQDGDVDTQMRGKDLRFLPFGFGRRICPGMNFGFATMEVMLANLMYHFDWDVPNMVGTGAGVDMAESFGLTLRRKEKLQLVPRIP

SEQ ID NO: 29699 - protein, 271 aa, Zea mays
TESARASRKQYKETLYSVLFDMNVPAVCAVDQAVLSLYASKRTSGIVVHIGFNTTSVVPIFQGRVMYEIGVETVGQGALKLTGFLKELMQRRNISCESLYTVRTIKEKLCYVAADYEAELRKDTQASCEIDGEGCFTLSEERFKTPEILFQPHMGGMRAMGLHKAVSLCMDHCYVSGTVGDDSWYKTVILAGGSSCLPGLPERLEKELHQLLPPYMSEGIRVLPPSFGTDSAWFGAKMISNVSTFTEAWCAKKKQFRQKTGRSGTLFANSW

SEQ ID NO: 29700 - protein, 477 aa, Anaplasma phagocytophilum HZ
MSVPITVAYGDGIGPEIMEAVLLILKEAQADIAVETAEIGHAQYKRDWPCGIAPSSWASIRRTKVLLKSPTMTPQGGGHKSLNVALRKSLGLYANVRPCVTYSPIIDTGSTNLDIVVVRENEEDTYCGVEYRISQDASVCDKITTRSASERLCAYAFRYARSHNRKRVTCLIKDNIMKMTDGTFRSAFQKIAAMYPDISSEYCIVDIGMARIAAHPEEYDVVVTPNLYGDILSDVVAVASGSIGLSGSANLGEEYAMFEAVHGSAPDIAGQNIANPSGLLNAAVQMLVHIGQESTAQAIYNAFLKTLEDGVHTADIYNAKTSSSRASTTEFAQAVVNNLGTSPKYLRSMLINKNTEEAMHYERVQDTSKKVLVGADVTIHWSGGDGLNELVQSLAAALPPSVKLRLIHAKGLELWPNAPCVCSYIDLLTCRFVYDAQEGADSTSISQLLLCLEGLGLDVVKLVKLYTFDGVEGFFTP

SEQ ID NO: 29701 - protein, 484 aa, Bacteroides thetaiotaomicron VPI-5482
MQQEEPNKYVKELTQEKYKYGFTTEVHTDVIERGLNEDVVRLISSKKDEPEWLLEFRLKAYRHWLTLEMPTWAHLRIPEIDYQAISYYADPTKKKEGPKSMDEVDPELIKTFNKLGIPLEEQMALSGMAVDAVMDSVSVKTTFKETLMEKGIIFCSFSEAVREHPDLVKKYMGSVVGYRDNFFAALNSAVFSDGSFVYIPKGVRCPMELSTYFRINARNTGQFERTLIVADDDSYVSYLEGCTAPMRDENQLHAAIVEIVVHDRAEVKYSTVQNWYPGDAEGKGGVYNFVTKRGNCKGVDSKLSWTQVETGSAITWKYPSCILTGDNSTAEFYSVAVTNNYQQADTGTKMIHLGKNTRSTIVSKGISAGHSENSYRGLVRVAEKADNARNYSQCDSLLLGDKCGAHTFPYMDIHNETAVVEHEATTSKISEDQIFYCNQRGIPTEDAIGLIVNGYAKEVLNKLPMEFAVEAQKLLTISLEGSVG

SEQ ID NO: 29702 - protein, 552 aa, Synechococcus sp. RS9917
MTTSAPAEPTQRQVRLDAPFTDQKPGTSGLRKSSQQFEQPHYLESFVEAVFRTLPGVQGGTLVVGGDGRYGNRRAIDVILRMGAAHGLSQVILTTGGILSTPAASNLIRQRQAIGGIILSASHNPGGPNGDFGVKVNGANGGPTPAAFTDAVFACTTTLEQYSIVDAAPIPLEAPGRHTIGTMTVEVIDGVEDFVALMQQLFDFDRIRDLIRSDFPLAFDAMHAVTGPYATRLFEELLGAPAGSVRNGVPLEDFGGGHPDPNLTYAHELADLLLNGEAYRFGAACDGDGDRNMILGQHCFVNPSDSLAVLTANATVAPAYAAGLAGVARSMPTSAAVDVVAKDLGIDCYETPTGWKFFGNLLDAGRITLCGEESFGTGSNHVREKDGLWAVLFWLQILAERRCSVAEIMAAHWARFGRHYYSRHDYEAVPSDAAHGLYERLEAMLPALRGQDFAGRRIQAADNFSYTDPVDGSVTTGQGLRILLDDGSRVVVRLSGTGTKGATIRVYLESYVPSSGDLHQDPQVALADMIEAINQLAEIQVRTGMDRPTVIT

SEQ ID NO: 29703 - protein, 476 aa, Ralstonia solanacearum
MSLFRTKNLDHMIRTGQGDTGLKKVFGPLDLTFLGVGAIIGTGIFVLTGTGALTAGPALTLSFVVAALACGFAALCYAEFASTIPVSGSIYTYAYATLGELVAWIIGWDLMLEYGLATSAVSVGWSGYFQSLMAGFGLHLPAALMAAPGAIPGVQTLFNLPALLIMLIITAVLSLGVRESARFNNIMVAIKVAVVVLFIVVGARHVQPANWQPFMPFGMSGVFGAAALVFFAFIGFDAVTAAAEEVRNPERDLPIGIIGSLGVCTILYVVVAAIMTGIVPYTKFAGVDHPVSLALQMGGETWVAGFVDLGAIIGMTTVILVMGYGQTRVIFAMSRDGLLPKRLSRVHPRYATPFFNTWLVGIVFALIAAFVPLNVLAELINIGTLAAFSLIAIAVLVLRRKRPDLPRGFRCPGVPFVPAAAVVLCVFLMSQLQALTWIAFVVWMVIGLLVYFGYARSRSLLHAPDRAAVPGSEAAH

SEQ ID NO: 29704 - protein, 491 aa, Burkholderia xenovorans LB400
MKRYQLFIDNEWVDPHSGAWFETDDPFTGEPWAEIPRADPTDADRAVRAAEKALEGPWSTLSASERGMLMYKLGALIERDAEHLATIESRDNGKLFRDVLGQMKYMAKYYYYFGGLADKIQGAVVPIDKPGIFNFIRYEPMGVVLSITPWNSSLPLTTWKMAPALCAGNTIVCKPSEFTSASLFELAKLFVEAGFPRGVFNVVTGFGPEIGASLVSHPGVARIAFTGGDEAGRKIYAAAAQHLKRVSLELGGKSPNIVFDDADLDQAVNGVISGIFSATGQTCVAGSRVLLQESIHDAFVERVAKLTRAAKVGNPLDPASEIGPITTKPQFEKILGYIDIATREGARCVAGGRALSGPGYGAGRFVEPTVFVDVTNDMRIAQEEVFGPVLSIIRFKDEEDAIRIGNDIKFGLAAGVWTNSLHRAMLMSQRLKAGTVWINNYRSSSFTTPFGGFKQSGIGREGGIESVKEFMEAKSVWMSSDLKMPALFAGK

SEQ ID NO: 29705 - protein, 822 aa, Shewanella sp. MR-4
MKVMKFGGTSLANWQRFSMAADIVAKAAKAEPVATVLSAPATVTNALLEMVDVAVKGEDYSPVIQHVERVFTSIYQDAVSSGLSSSQSEVLFAGLSAQLARWQDRLRGITLLQECPDGVRAEIVVAGERLSAALMEQVMLAKGITSAQLDPRELFLGRGRPLESVVDIAVSKPRFKNLALDEKRVWVMPGFTAADEDGKVVTLGRNGSDYSAAVLAACLDASSCEIWTDVDGVYNTDPRVVTDAKLLSQLSYQEAMELSYFGAKVLHPKTIAPIAQFHIPCYIKNSFNPDAPGTLVSNQADESGLQVKAISNLDNQTMFDVSGPGMKGMVGMASRTLAAISRSGVSVSLITQSSCEYSISFCVATSESAKVKSALEQEFELEIKSDLLEPIEMRHDLAIVSLIGDGMRTHKGVAARFFQALAQASVNIIAIAQGSSERSISTVIEQRKTKHAVAACHQGFFDVQQYLDVFLVGCGNVGAGLLEQIKHQASVLKEQHISIRVCGIVNSSKMLLDSAGIDLNNWQNLLADSQQPSDLPALLAWVKEQQLLNPVLVDCTSSDQVSNQYLEVMNAGMHVVTPNKKANTRDYAYYQALRQTALKQRRQFLYETNVGAGLPVIDNLKKLLFAGDKLHKFNGILSGSLSFIFGKLDEGMTLSEATKLAREKCFTEPDPRDDLSGMDVARKVLILAREVGLKLELSDIVVDSVLPDDFDDSGDVESFMARLPEADAAIAARVAEAKAQGKVLRYVGQIEEGACYVRITEVDATDPLYSVKGGENALAFYSRYYQPIPFVLRGYGAGTEVTAAGAFADVLRTLNWTREVSV

SEQ ID NO: 29706 - protein, 340 aa, Cyanidioschyzon merolae strain 10D
MAVPKVGINGLGRIGRLVLRAAVEKGTVEIVAVNDPFIFSDVSYAAYSLKYDSTHGAFPGEIGTDGEHLVINGKKITCFAIRDPADIPWASTGAEYVVESSGAFTTAEKASLHLKGGAKKVVVSAPAKDVPMFVMGVNHDSYTKDLQVVSNASCTTNCLAPLVKILDEAFGIENGLMSTIHAVTATQRTVDGPSNKDWRRGRSAMLSIIPSSTGAAKAVGKVYPKLDGKLTGMAFRIPVALVSVVDLTANLKTPTTYEEIKHVMKAAAENPEFKGIFGYTEDPIVSADLAHSSYSSVFDAQAGIMLSPTFVKLVSWYDNEWGYSNRVVDLITHMAKVDAA

SEQ ID NO: 29707 - protein, 442 aa, Zea mays
MDRLDGSARLLLVSDLDQTMLHYSQIDHDDRENLSLLRFEALWEAEFAQDSLLVFSTGRTPVSYKGLRRDKPLVTPDVTIMSVGTVIAYGEEMVRDVGWEERLDSDWDRAVVVEETARLPQLTRMQPERNQGPHKVSFFVDKQGAQEVMDYLPKKLERRGVDVKIVYSSGNALDVLPRGAGKGQALVYLLKKLDSNGKPPKNTLVCGDSGNDAELFGVPSVHGVMVCNAQEELVQWYQENARDNPRIIQATERCAAGIMQAIGHLGLGPNVSARDLVGFPAYYPNNNKKGAAATAKPADVVVRFYVLYEKWRRGELPSSNYFSSSSAMRYLKSITHPNGTIIHPCGSERSLHASVDALLSSCYGDKKNFRVWVDRLVTSPIGTSSWLARFDSWEMEGGVRYCCRTTILLNIKPESPEGLELTHIHKTWVQGHSAGPGSALVF

SEQ ID NO: 29708 - protein, 273 aa, Staphylococcus aureus
GTPYKESDIEPYYTDIRHGKRPSEEELQDLKDRYEFIGGLSPLAGTTDDQADALVSALNKAYADVEFKLYLGLKHISPFIEDAVEQMHNDGITEAITVVLAPHYSSFSVGSYDKRADEEAAKYGIQLTHVKHYYEQPKFIEYWTNKVNETLAQIREEEHKDTVLVVSAHSLPKGLIEKNNDPYPQELEHTALLIKEQSNIEHIAIGWQSEGNTGTPWLGPDVQDLTRDLYEKHKYKNFIYTPVGFVCEHLEVLYDNDYECKVVCDDIGANYYR

SEQ ID NO: 29709 - protein, 480 aa, Brucella melitensis biovar Abortus
MQTRYPDVKLFIDGTWRDGSRGETIEIFNPATDEVIGHIARATTADLDDALAAVDRGFEAWSKVSAFDRYKIMRRAADIFRSRGEEVARLLTMEQGKPLAEARIEAAAACDLIDWFAEEARRSYGRIVPPRQAYVMQAEVKEPVGPVAAFTPWNFPINQAVRKISAALAAGCSILLKAAEDTPAAPAELVRAFAEAGLPDGAINLVYGDPAEISAYLIPHPVIRKVSFTGSTQVGKQLAALAGLHMKRVTMELGGHAPVIIAADADVEQAIKVVSGSKFRNAGQVCISPTRFLIENSVYDQVVEGMAAYATSLKVGDGLEAGTTMGPLVNAKRVNAMERLVQDAREHKARVVTGGERIGNRGNFFEPTILADVPRDAAIMNEEPFGPVALLNRFDALDEALSEANRLNYGLAAYAFTGSSAKAARISSTVRSGMITINHYGLALPEVPFGGINDSGYGTEGGADALEAYQNTKFVSFLQA

SEQ ID NO: 29710 - protein, 436 aa, Thermoplasma acidophilum
MSGKADPLEIAKEAKPSQANNEVEEDPFEIALKQLRKAAKVLNLDEQALEILSSPQKILQVSLPVKMDDGKVKVFTGFRVRHNIARGPAKGGIRFHPQETLSTVKALSMWMTWKCAIADIPYGGAKGGIICDPSTMSQGELERLSRAYIRAIADFIGPDVDVPAPDVNTNPQIMAWMLDEYENIVRHNAPNVITGKPLEVGGSLGRFDSTGKGGMFVLREGAKKIGLDLSKARVAVQGFGNVGQFAVKFVEEMFGAKVVAVSDIKGGIYSENGFKFDDLLAWSKKIGSVVGFPGSKPITNEELLESDVDVLIPAAIEEQITARNADKIKAKIILELANGPTTPEADEILYKKGKLVLPDVLSNSGGVIVSYFEWVQNNYGEYWSTEEVTNKLDVKITKAARQVLETMDKYHVDPRTAAYVIAVKKVADAMKVRGWY

SEQ ID NO: 29711 - protein, 371 aa, Ralstonia metallidurans CH34
MTISRIEDIIADIRAGRMVILVDEEDRENEGDLVLAADFVTPEAINFMAKYGRGLICLTLTAERCRQLELYPMVSRNGTVHGTNFTVSIEAAEGVTTGISAADRSRTVQAAVARDARASDLVQPGHIFPLTAQPGGVLIRAGHTEAGCDLGTLAGLTPAAVICEIMKDDGTMARLPDLIEFAREHDLKIGTIADLIHYRSRTESIIERVGERDMQTPWGTFHSVLYRDKPSGRAHVALVKGKPQPDRETLVRVHEPLSVLDLLEAGHTTHSWSLPAALEVLHGAEHGVMVLLNCGDSPEMLFEQFAALDAPENRPRRKPDLRTYGVGAQILRDIGVGKMRVLGSPQKMPSMTGYELEIVGCQPMSGESNRG

SEQ ID NO: 29712 - protein, 215 aa, Buchnera aphidicola str. APS (Acyrthosiphon pisum)
MNQTLLSKFGKPIERIKNAILALKSGQGVIILDDEERENEGDLVFACENMTVEQMALSIRYGSGIVCLCITESKRKQLNLPMMVKKNTSAYRTGFTVTIEASKGISTGVSAKDRLTTIKTAIADDAKPSDLNRPGHVFPLRAHKGGVLSRPGHTEAAIEIVSLAGFKPAGVICELTNKDGTMARTPEIIKFSENKKMQVLTIQDLIFYIKNINHL

SEQ ID NO: 29713 - protein, 273 aa, Staphylococcus aureus
GTPYKESDIEPYYTDIRHGKRPSEEELQDLKDRYEFIGGLSPLAGTTDDQADALVSALNKAYADVEFKLYLGLKHISPFIEDAVEQMHNDGITEAITVVLAPHYSSFSVGSYDKRADEEAAKYGIQLTHVKHYYEQPKFIEYWTNKVNETLAQIPEEEHKDTVLVVSAHSLPKGLIEKNNDPYPQELEHTALLIKEQSNIEHIAIGWQSEGNTGTPWLGPDVQDLTRDLYEKHQYKNFIYTPVGFVCEHLEVLYDNDYECKVVCDDIGANYYR

SEQ ID NO: 29714 - protein, 307 aa, Desulfovibrio vulgaris subsp. vulgaris str. Hildenborough
MQQFDAIVIGGGPAGMTAALYLARSGVSVAMVERLSPGGQVLMTSEIENYPGFPKGIQGWELADLFAAHLEGYAITRFNDEVREIVPAPADNRVRVGDDWISGRTLILCSGARYKRLGLPDEERLTGKGVSYCALCDGNFFRGQVVGVVGGGNSALEESLYLSKLVKKLHLIHRRDDFRAAKCYQDKVCIMPDIDVVRSSVVEAIHGDDRLTGVTVRNVKTGETSFLELDGLFIFIGFEPVGGFLPGGIERDEQGFVITDGEMRTNLPGIFAAGDIRSKMCRQVTTAVGDGATAANAAFVYLEQLDA

SEQ ID NO: 29715 - protein, 107 aa, Desulfovibrio vulgaris subsp. vulgaris str. Hildenborough
MAAQITDATFEASVLKSAIPVLIDFWAPWCGPCRAMGPVIDELAAEYEGKVLIVKMNVDDNPATPSKYGIRAIPTLILFKNGEVVEQVTGAVSKSSIKDMIAQKALG

SEQ ID NO: 29716 - protein, 343 aa, Saccharum officinarum
MAPSSYEMAASILLCAEDSSSILDLEAEAEEEEVMLARSSRTRGDPSVVFPVPSEECVAGFVEAEAAHMPREDYAERLRGGGMDLRVRMDAVDWIWKVHAYYGFGPLTACLAVNYLDRFLSLYQLPEGKAWTTQLLSVACLSLAAKMEETYVPPSLDLQIGDARYVFEAKTIQRMELLVLSTLKWRMQAVTPFSYIDYFLHRLNGGDAPSRRAVLRSAELILCTARGTHCLDFRPSEIAAAVAAAVAGEEHAVDIDKACCTHRVHKERVSRCLEAIQATVALPGTVPRSPTGVLDAAGCLSYRSDDTAVAAAAAASHASSSSWCDEDDDSSPVVCSKRRKISR

SEQ ID NO: 29717 - protein, 168 aa, Rubrivivax gelatinosus PM1
MSRPALEFAVCDLCDEHKNDTDGAFRVLPPVFHSYGGVAKFAGPVSTVKCFEDNSLVKLALDEPGQGRVLVVDGGGSLRRALVGGNIGAAAAKNGWAGVLVNGCVRDAAELAASAVGIRALALMPLPTEKRNEGQRDVAVQVQGVWVRVGDWLYADEDGVVVMPSPAG

SEQ ID NO: 29718 - protein, 590 aa, Blastopirellula marina DSM 3645
MKKVNATTATDTGLMLGADIMIESLVRHGVDVIFAYPGGCSMPLHQALTRYKDKIRTILPRHEQGGGFAAQGVARTTGKVGVCMATSGPGATNLVTAIADAKLDSIPMVAITAQVPRAVIGSDAFQETPIVEVCRGITKHHYLVTDIADLTRIMKEAFHIASTGRPGPVLIDIPKDVQLEQIVPDWDCAMNLPGYNYEARTAKPEQIKQIAAAIKRAKRPMIYSGGGIITSGASEELRELVEKTGIPITTTVMGLGSFPGDDPLSLDMLGMHGTVYANYAVQNCDLLISLGVRFDDRVTGKLAEFAKHAKIIHIDIDPSEINKNKLAHFPVVSDLKPALRMLCDIVEKPEDISEWVAQCAKWKKDEPLKYDTSFEGILQQHAIAELNDICKERDTIISVGVGQHQMWAAQFYKFKKPRTWLSSSGLGTMGFGLPAAMGAQVAFPDALCIDIEGDGSFTMNIQELATCFCEKLPVKVMLLNNQHLGMVVQWEDRFMSGNRAHTYLGPVHHPEATGDGNERYAAERYPDFVMIAKGFGCGGATVSRKSELRAAIEEMINYDGPYVLDVQVPYQEQVLPMIPSGMTVNDIIKE

SEQ ID NO: 29719 - protein, 634 aa, Hordeum vulgare
MILHLLSSHDELRCISTFCYILALAISSILSLLLSTTEAEGTLGRAVCPLLCDTSRHPASFPLRGDPPSCGVREYELICRDAQAIIHINTGRYFVTSISYSDSVFWVVDAKLDHGSCPIPERNQLPYFYGFDSANMILFLLYSGRWASFVSCSRMIKDNANYRPVACQSTNSSFVYVSTALRWAVDVEPSCRYLAMTPLESSRLRVADVTSYDYEDVVKFMREGFAVRFPFLPPDWTYSWIINTCLNNSRRNNSKSDNSKLYWAVLVVVSAIMFAVLSRLVFAPLSILIFLAHKYWKTKISIDAVERFLQMQLALGPTRFAYTDITAITSHFKEKLGQGGYGSVYKGVLPGDVHVAIKMLVSSMSNGEEFISEVSSIGSIHHVNVVRLVGFCSEEMRRALVYEYMPHGSLEKYIFSPEKSFSWDKLNQIALGIARGIDYLHRGCDMQILHFDIKPHNILLDSDFTPKIADFGLAKLYPRDNSFLPVSCAGTVGYIAPEMVSRSFGAISSKSDVYSFGMLLLEIAGGRRNVDPRASRSQTYYPAWVYNQLQEVGVEISEAVVGIHQVERKLCVVALWCIQMKPDDRPAMSEVLDMLEAGIDGLEMPPEPFFCGDEYAPAADSSILLLSEISTISE

SEQ ID NO: 29720 - protein, 1346 aa, Salinibacter ruber DSM 13855
MQGSPSAVPRSDDFVWMLHSAVKRYGIRLACGVVVGALLLSSPAAAQNKRITAYETEDGLPEMQVWDGLQGPEGYLWLGLYGGGLARFDGQEFKRLTIDEGLPGNLATTVHTDSTGVIWVGTLSGLARYDGREMTTLTADNSALVQNGIQSIVGGTNGTPVWVGTSDNVYVHDGEGLRQLAPDRLQNLYPDGLASRGDTLWVGTSNGLYRYTDSTLTALSVVDGGATASVTTLAAPPSGRLWVETGQGLFRRVGSRFEKLPGTSDRDVLSILDPSGRAPWLGTRSGLYRWRGGRLQSTAIGDVSVQGLFEDQEQNVWVTTDSEGLYKYPHTPFDHFSTADGLPGDVSWDVDRGPNENLWIATRNGLSRYDGTSFTDVPGPDDQLRQELTSIHWTQDDILWIAARSTLFRYDGDTYTSYDRVEGDPVGTVTRIVETPSGTLWFATTERGLLRYDGSGFARFTTADGLTSDQVRSVTVDDTGQVWAGEGASRFDGASFHPTPAVDSADLGGVLSLEVDAKGHLWIGTQRGVFVHPPPQRGEAASLRRITPDDGLNGTSSVNLHLDRHNNLWVGNEGGFNRIDVDAYHRTGQVSIRSYDKDVDLRGGVATEHATYEADGGMLWFGTSTGLVRYNPAQDRGRPAPPQTHLTDIQLYPEDPDWSRYADGTTPWEQLPTNLSLPYDKDHLIFRFIGINYTVPERVAYRYRLEGLDERWSTATKRQRATYSNLPPGSYTFQVQAANSDDVWGPVEAYSFTITPPFWRTTWFYLLCAIGGIGLVTGLIRWRTWSLQRRQRLLEAKVAERTEELEEAREEALAAAEAKSKFLANMSHEIRTPMNGVIGFADLLSDTDLTPEQQQFVDAIQSSGTTLLSIIDDILNFSKLEAGETELEEAPIRVQTCIEEALDPLAAKVAEKGIELTYLIDPAVPSVIRGDRTRLHQILLNLLSNAVKFTEEGEVALRVRVASSPATPDGTYELHFSVRDTGIGIPKEKRDRLFESFSQVDASKSREHGGTGLGLSISQQLTEAMGGEMWVESAVGEGSTFHFTIEAEEAEDGAQTDKNGVATGSSSAMQGVQVLIVAPNDTNRALLRQQTETWGMEATVFASGDEALQQLDADRAHEVALIDEHLPQMSGHALATQLRERASGTELPVVLLGAGPAATPDLTAPTSRLHKPIKQSSLHDTLTALLTGRENGGSGRDGDRSGPDSPSRRVLLAEDDAVNRTMTTQLLEKMGHEVYTASDGAEALAAVRDQAYDAILMDVQMPELDGLEATRRLRNEMPSEEQPYVVALTASVTEDDRRRCLEAGMDAFLSKPIRKDELAEALDLGTAPDEARTAAPPPEDHSAPDA

SEQ ID NO: 29721 - protein, 112 aa, Azospirillum brasilense
MKKIEAIIKPFKLDEVKEALHEVGIKGITVTEAKGFGRQKGHTELYRGAEYVVDFLPKVKIEVVMEDSLVERAIEAIQQAAHTGRIGDGKIFVTPVERIVRIRTGEKGGDAI

SEQ ID NO: 29722 - protein, 581 aa, Arabidopsis thaliana
MTKEVCSNIGLWLLLTLLIGNYVVNLEASHHVYKRLTQSTNTKSPSVNQPYRTGFHFQPPKNWMNGPMIYKGIYHLFYQWNPKGAVWGNIVWAHSTSTDLINWDPHPPAIFPSAPFDINGCWSGSATILPNGKPVILYTGIDPKNQQVQNIAEPKNLSDPYLREWKKSPLNPLMAPDAVNGINASSFRDPTTAWLGQDKKWRVIIGSKIHRRGLAITYTSKDFLKWEKSPEPLHYDDGSGMWECPDFFPVTRFGSNGVETSSFGEPNEILKHVLKISLDDTKHDYYTIGTYDRVKDKFVPDNGFKMDGTAPRYDYGKYYASKTFFDSAKNRRILWGWTNESSSVEDDVEKGWSGIQTIPRKIWLDRSGKQLIQWPVREVERLRTKQVKNLRNKVLKSGSRLEVYGVTAAQADVEVLFKVRDLEKADVIEPSWTDPQLICSKMNVSVKSGLGPFGLMVLASKNLEEYTSVYFRIFKARQNSNKYVVLMCSDQSRSSLKEDNDKTTYGAFVDINPHQPLSLRALIDHSVVESFGGKGRACITSRVYPKLAIGKSSHLFAFNYGYQSVDVLNLNAWSMNSAQIS

SEQ ID NO: 29723 - protein, 226 aa, Schizosaccharomyces pombe 972h-
MNRIGILSRSDGSSEWKQGSARVICGVNGPIDVKIRDERLNKATVEVLVQPVSGVAETLEKMISSRIVGILEDAIFLNTYPRTLIQVSIQIIEEDGTDTLAAVINGAVLALLDAGISLKYIPCAINCHWKNKITQDEPDVDGTINKLESIITICYSISSEPAKLIFLETAGPIPEEDFFRVLETAPLHAEEVSKKMKELLFETYNESDGHENEKNPKEDVEMDVVA

SEQ ID NO: 29724 - protein, 314 aa, Candidatus Pelagibacter ubique HTCC1002
MSENPIKHTKVLIIGSGPAGYTAAVYAARAMLNPILVYGVQPGGQLTTTTDVENYPGFSDVIQGPWLMDQMRDQAKAVGTDLIEDHISSVNLKSTPFEAIGDSGQKYKADSIIISTGAQARWLNLESEQAYRGFGVSACATCDGFFFKEKVVAVVGGGNAAVEEAMFLTKFASKVKLIHRRDTLRAEKLLQKKLMENKKIEIIWDSAVEEVIGDSEPKNVKAIKIKNLKTNKIEEMKIDGLFIAIGHDPATALFKEQLEMDKEGYLLTKPDSTETNIPGVYAAGDVKDKTFRQAVTAAGMGCMAALEAEKFLSH

SEQ ID NO: 29725 - protein, 495 aa, Thermus thermophilus
MPLITTETGKKMHVLEDGRKLITVIPGDGIGPECVEATLKVLEAAKAPLAYEVREAGASVFRRGIASGVPQETIESIRKTRVVLKGPLETPVGYGEKSANVTLRKLFETYANVRPVREFPNVPTPYAGRGIDLVVVRENVEDLYAGIEHMQTPSVAQTLKLISWKGSEKIVRFAFELARAEGRKKVHCATKSNIMKLAEGPKRAFEQVAQEYPDIEAVHIIVDNAAHQLVKRPEQFEVIVTTNMNGDILSDLTSGLIGGLGFAPSANIGNEVAIFEAVHGSAPKYAGKNVINPTAVLLSAVMMLRYLEEFATADLIENALLYTLEEGRVLTGDVVGYDRGAKTTEYTEAIIQNLGKTPRKTQVRGYKPFRLPQVDGAIAPIVPRSRRVVGVDVFVETNLLPEALGKALEDLAAGTPFRLKMISNRGTQVYPPTGGLTDLVDHYRCRFLYTGEGEAKDPEILDLVSRVASRFRWMHLEKLQEFDGEPGFTKAQGED

SEQ ID NO: 29726 - protein, 497 aa, Gossypium hirsutum
MTQQAILLSLRFRPRRKLNFPPGPKPWPVIGNLDLIGSLPHRSIHALSQKYGPLMQLKFGSFPVVVASSVEMAKAFLKTHDVIFAGRPKIAAGEYTTYNYSDITWSPYGPYWRQARKMCMTELFSAKRLESYEYIRREEMKLLLKGLYESSGVPIVLKDRLSDLSLNVISRMVFGKKYTEGTGENEIVTPKEFKEMLDELFLLNGVLDIGDSIPWLRFLDLQGNIKRMKALSKKFDKFLEHVLDEHNARRRDVKDYAAKDMVDVLLQLADDPNLDVKLERHGVKAFSQDLIAGGTESSAVTVEWAISEMLKKPEIFAKATGELDRVIGRERWVEERDTVNLPYIDSIAKETMRLHPVAPMLVPRMTREDCQVDGYDILKGTRALVNVWTIGRDPTVWDNPNEFCPERFIDKTIDVKGHDFQLLPFGAGRRMCPGYPLGIKVIQASLANLLHGFTWKLPGNMTKENLDMEEIFGLSTPKKCPLQAVAVPKLPLHLYSH

SEQ ID NO: 29727 - protein, 111 aa, Buchnera aphidicola (Cinara cedri)
MKVTKIIELTDQNFEKKVFFSKKFFLVDFWADWCGPCKILSPILEEIAHEYYKKIFIGKINIDINKNIPIKFSIKGIPALLLFNKKKIIGTKIGLITKVELKNFLDKKIVT

SEQ ID NO: 29728 - protein, 94 aa, Zea mays
AISCGQVASAIAPCISYARGQGSGPSAGCCSGVRSLNNAARTTADDRRAACNCLKNAAAGVSGLNAGNAASIPSKCGVSIPYTISTSTDCSRVN

SEQ ID NO: 29729 - protein, 77 aa, Arabidopsis thaliana
  misc_feature (20)..(20): Xaa can be any naturally occurring amino acid
  misc_feature (33)..(33): Xaa can be any naturally occurring amino acid
  misc_feature (40)..(40): Xaa can be any naturally occurring amino acid
  misc_feature (43)..(43): Xaa can be any naturally occurring amino acid
  misc_feature (48)..(50): Xaa can be any naturally occurring amino acid
TPPQTTMATTVTLKSFTGLXQSSTEQTNFVSHXPSSLSLXQRXTSLRXXXAFFFHFSPPPGGGGGGYGPGKIKHPPH

SEQ ID NO: 29730 - protein, 327 aa, Glycine max
MREIQLPLSQTQKVRLQKALEQLESLSTKVNSDASVIIADSIHVNHEDGVLKGHGTADLNGEVVATLCGVVERVNKLVYVRALRSRYKPEVGDIVIGRVVEVAQKRWRLEINYNQDAVLLLSSMNMPDGVQRRRTAVDELNMRCIFEENDVVCAEVRGFQHDGLHLQARSRKYGKLNRGQLLTVPPYLVKRQKQHFHHLEEFGIDLILGCNGFIWVGEHVEAKDDMIEDQVSQSDSQVLFPNKNCVSLEEQEKNYTILETRKYISRAANAVRVLSTLGFNITLEIIKGIIDLSLSMNLDIHDMLGSEFCVLVAEKEAERRSSMKKRR

SEQ ID NO: 29731 - protein, 449 aa, Francisella tularensis subsp. holarctica
MNAQKYIDSVIAQVEKRDGHEKEFIQAVKEVFSTLKPALEHNPKYIEENILARMVEPERGISFRVPWVDKDGNIQVNRGYRYQFNGAIGPFKGGIRFHPSVYSGIIKFLGFEQVFKNSLTTLPMGGGKGGADFDPKGKTDAEIMNFCQSFMMELQRHIGPDIDVPAGDIGVGGKEIGYMYGQYRRIRACFENGVLTGKSLESGGSLIRPEATGYGAVFFLDEMLKHDGETLQGKTVVTSGYGNVAWGVCKKVAQLGGKVVTISGSKGFVHDPEGITTDEKIEFLLKIRNGEKTMQDYAKEFNASWHAGQKPWGIKADIAIPAATQNEIDFEDAQKLIDSGVKYVVEASNMPTTNEAIEFLMKKGIILAPGKAANAGGVAVSGLEMSQNSARLSWSAEEVESKLQQIMANIFHACKFASSKYNLGYNLVAGANLAGFEKVAEAMIQQGRY

SEQ ID NO: 29732 - protein, 123 aa, Taraxacum officinale
NAKLAVEKSLTPPEVPQLPSPETSASSTTVSLSVATDLESGAVPSSLSPATVEVVPKPQQRNRCGSCSRRVGLTGFTCKCGTTFCGTHRYPELHACTFDFKTIGKEAISKANPLIKAEKLNKI

SEQ ID NO: 29733 - protein, 605 aa, Rickettsia akari str. Hartford
MTKTRINLLRSLFTEYDIDSYIIPSNDKYMSEYVPEYAKRLEYITGFTGSNGIVIICKDTALFFTDGRYLEQANKELDLELFKIFDLKDISTTLNKDSRVGYDPQLFTCPAISNLKLNFQKINGNLVDKIWHNQPSEPNSKVYLHDIKFAGASHNDKINKCRKTLLSSRGLTAGSSNYNEQYALIILDSSYICWLLNLRASDVAYTPLMFAKVIVTSTKLYLFIDLIRIDAEIINARPEITILPEEEFGNILKGHDNIFVDDTIASVHIMDLIADKKVQKITDPCLTLKACKNDIEIKHAIDFHIKDAVALCEFFADLAQCHLRENMDLEKHNMDSSFRRNDIWDHEHDELNEYSLGLKLTEYRAKQEGYVSDSFPAICGFQENSAIIHYRAVLENAKKIIGHGILLIDSGGQYSGATTDITRTIMIGTPTDEQKKRYTQVLKGHIALAKAKFPKNIITGANLDILARQYLWQDMLDYPHGTGHGVGSFLSVHEGPQSINLRNRTVLQKGMILSNEPGFYIPGKYGIRIENLMYVKENSGWLEFETLSLVPYDSKLIDTKLLNIDEINYIKEYYNKIRAKIYDLLSPQARGWLNNEINLFLQSLL

SEQ ID NO: 29734 - protein, 289 aa, Ralstonia solanacearum
MTAQLIDGNALAKQLRTEAAQRAAALTARGHQPGLAVILVGDDPASQVYVRNKIKACEDNGFLSIFDRYPADLTEADLLGRIDALNRDPRIHGILVQLPLPKHIDSHKVLEAIAPEKDVDGFHVANAGALMTGAPLFRPCTPYGCMKMLESIDYPVRGARAVVVGASNIVGKPMAMLLLQAGATVTICNSKTRDLAAHTREADIVVAAVGRRNIITADMVKPGAVVIDVGMNRDDAGKLCGDVDFAGVRDVAGHITPVPGGVGPMTITMLLINTLEAAERAAEDAALAA

SEQ ID NO: 29735 - protein, 320 aa, Yersinia pestis biovar Medievalis str. 91001
MMQSKPGVLMVNLGTPDAPTSKAIKRYLAEFLSDRRVVDTSPLLWWPLLHGVILPLRSPRVAKLYQSVWMEEGSPLLVYSRRQQKALAARMPDIPVELGMSYGSPNLPEAIEKLLAQGVTNLVILPLYPQYSCSTSAAVWDAVARVLKGYRRLPSISFIRDYAEHPAYISALKQSVERSFAEHGQPDRLVMSFHGIPKRYAQLGDDYPIRCEDTSRALRAALPLPAEKIIMTYQSRFGREPWLTPYTDETLKSLPSQGVKHIQLICPGFSADCLETLEEIKEQNREFFLHAGGEKFEYIPALNDDEGHIALLEQLIRHNI

SEQ ID NO: 29736 - protein, 299 aa, Pseudomonas aeruginosa UCBPP-PA14
MAGQDLSGKTAIVTGGYSGLGLETTKALAYAGARVIVTARRPDVAREALLGLDEVEVQALDLAELACVRRFAEAFSASRRRADIVINNAGVMACPETRVGPGWEAQFATNHLGHYALVNLLWPSLADDARVVAVSSAGHHYSAIRWDDVQFERGYDKWLAYAQSKTANALFAIQLDALGRERGVRAFAVHPGSIATPLQRHVPRAEMIALGWMDEAGNPASPDTLKTPQQGAATQLWAATSPLLAGMGGLYCEDCDIAGVAPDDSRTLAGVREHAIDPEQARRLWRLSATLTGIDAFAS

SEQ ID NO: 29737 - protein, 94 aa, Zea mays
RPVREPRSTTLHHTTHTRRRSHTRRRSSSLDRDRDAGSYKLAKTGIIMAASTVEELSATASHARDSLKETNANDPLEKYCKDNPDSEECRIYDN

SEQ ID NO: 29738 - protein, 554 aa, Ralstonia solanacearum
MSQVVEIKVPDIGDYKDVPVIELHVKAGDTVSAEDSLVTLESDKATMDVPSPKSGVVKEVKIKVGDAVSEGSLVLLLEEQGATAASAPQAAPAPAPVAAALAPAAQAPVSAPAAQPAAGGGTIEVKVPDIGDYKDVPVIEISVKVGDKVEAEQSLITLESDKATMDVPSPAAGTVKDIRVKVGDAVSEGTLIVVLEGAGGAAAAAPAPAPAPAAAAPSPAPAVAPVAAPAAAPATYTADTVGTIGKAAHASPSVRKYARELGVDVNLVGGTGPKNRITQEDVQRYVKGVMTGQAAAPGKAAAAAAPAGGGELNLLPWPKVDFTKFGPVEPKPLSRIKKISGANLHRNWVMIPHVTNNDEADITELEAFRVQMNKEHEKAGVKFTMLAFVIKAVVGALKKFPTFNASLDGDNLVFKQYYHIGFAADTPNGLVVPVIRDADKKGVVDIAREMAELSKAAREGKLKPDQMQGGCFSISSLGGIGGTHFTPIINAPEVAILGLSRGYQKPVWDGKQFVPRLTLPLSLSYDHRVIDGAEAARFNAYLAAVLADFRRVLL

SEQ ID NO: 29739 - protein, 429 aa, Escherichia coli CFT073
MSDDKFDAIVVGAGVAGSVAALVMARAGLDVLVIERGDSAGCKNMTGGRLYAHTLEAIIPGFAASAPVERKVTREKISFLTEESAVTLDFHREQPDVPQHASYTVLRNRLDPWLMEQAEQAGAQFIPGVRVDALVREGNKVTGVQAGDDILEANVVILADGVNSMLGRSLGMVSASDPHHYAVGVKEVIGLTPEQINDRFNVTGEEGAAWLFAGSPSDGLMGGGFLYTNKDSVSLGLVCGLSDIAHAQKSVPQMLEDFKQHPAIRPLISGGKLLEYSAHMVPEGGLAMVPQLVNDGVMIVGDAAGFCLNLGFTVRGMDLAIASAQAAATTVIAAKERADFSASSLAQYKRELEQSCVMRDMQHFRKIPALMENPRLFSQYPRMVADIMNDMFTIDGKPNQPVRKMIMGHAKKIGLINLLKDGIKGATAL

SEQ ID NO: 29740 - protein, 679 aa, Schizosaccharomyces pombe
MSLLRIRKASLYGFSTVFILLQSYAVAYPLRAFRQNDGIGIAMNPSQDGGFVSAEKDSDFEYWMKLIISAVLILLGGVFAGLTIGLMGCDDLHLQVLEQSGDASERVHARKVLKLLRRGKHWVLVTLLLGNVIVNETLPIVFDSIIGGGWPAVLISTAMIVIFGEVIPQATCVRYGLSIGAKLEPIVLFMMYLLWPIAYPTALILDACLGESQSTMYKKSGLKTLVTLHRDLGIDKLNQDEVTIITAVLDLREKHAESIMTPIEDVFTLPMDRILDEDLIGEIICAGYSRIPVHKPGFPHDFIGMLLTKTLIGYDPDDKWPVGKFALATLPQTWPNTSCLDLLNYCQEGKSHMILISNSPGEPHGAIGVITLEDIIEELIGEEIIDETDVYIDVHKGLPRVGENNDFWNRMLHRSHLSTMAALHKSQRSHDLAANEHAPILNPKNSALNPRLVTNDRVKVKSPSLIQSSTGYGSMSQSPSRSDLPSKISRVNAELQAHGSQRSSIDVSKENKSSVADGPSSQAHNGPSTQPPEALPNGTDPSSSKTTENNGNQQSERTESADGKKDNSGSISSNSSKTFTGKRVRLGNVIESNVVSPDGTNRIVIEPFERSVDPNNADIVEMVERNGIVVPKVTVTSHEDDVDSVHNTPMSVSSTLSVKTSSSKVPRNKRKRRKGKSKK

SEQ ID NO: 29741 - protein, 254 aa, Saccharum officinarum
AIDWIWKVIEHYNFAPLTAVLSVNYLDRFLSTYEFPEDRAWMTQLLAVACLSLASKMEETFVPLPLDLQVAETKFVFEGRTIRRMELHVLNTLKWRMHAVTACSYVKYFLHKLSDHGAPSLLARSRSSDLVLSTAKGAEFVVFRPSEIAASVALAAMGECRSSVIERAASSCKYLNKERVLRCHEMIQEKITMGSIVLKSAGSSISSVPQSPIGVLDAAACLSQQSDDATGGSPAVCYHSSSTSKRRRISRRLL

SEQ ID NO: 29742 - protein, 441 aa, Arabidopsis thaliana
DAIGITPLYIGWGLDGSVWFASEMKALSDDCEQFMCFPPGHIYSSKQGGLRRWYNPPWFSEVVPSTPYDPLVVRNTFEKAVIKRLMTDVPFGVLLSGGLDSSLVASVALRHLEKSEAACQWGSKLHTFCIGLKGSPDLKAGREVADYLGTRHHELHFTVQDGIDAIEEVIYHVETYDVTTIRASTPMFLMSRKIKSLGVKMVLSGEGSDEIFGGYLYFHKAPNKKEFHEETCRKIKALHQYDCLRANKSTSAWGVEARVPFLDKEFINVAMSIDPEWKMIRPDLGRIEKWVLRNAFDDEKNPYLPKHILYRQKEQFSDGVGYSWIDGLKDHANKHVSETMLMNASFVFPDNTPLTKEAYYYRTIFEKFFPKSAARATVPGGPSVACSTAKAVEWDAAWSQNLDPSGRAALGVHVSAYGEDKTEDSRPEKLQKLAEKTPAIV

SEQ ID NO: 29743 - protein, 572 aa, Pseudomonas aeruginosa PAO1
MSSKKVAEIVVETLEAAGVRHCYGIVGDTLNHVTDAIHRSQIQWVHVRHEEAAAFAAGAESYISGRLTACAGSCGPGSLHFINGVYEAQRNRAPMVLIASQIVTPQLGMEFPQEVDFKAVYASCSVFCEQVHSPEQARRVVALACQAALNRRGVAVVILPADISQATVKDDLPFSVHFPQPVLRPSDAELQDVARLLAHGKKIGIYAGSGCQGAHDLLVALADRLKAPIAHTSRAKDFVEYDNPFNMGMTGMLGIESGFHMMTECDTLLLLGADFAWAQFYPQKATLIQVDRDGSHLGRRHPIDLGVVGDVIPTLEALLPLLEAREERSFLDECLEHRERSLRTLEKEEQAGKGELIHPQHLVSLLDQHASEDALFTADGGSAMVWLLRHIHSNGKRRTLTSLVHGTMANAMPQALGLKKAYPERQVISISGDGGLAMLLGDLLTAIQEKLPIKVVVLNNASLNFVELEQKVEGLLDNYTDLLNPDFARLAEVIGFHGRKVTRSEELEAAVQEFLAQPGPALLDVHTNPAELVMPPKIEFGQVADTALYAAKAVLSGRFKDVETLLVNNLLK

SEQ ID NO: 29744 - protein, 1482 aa, Ustilago maydis 521
MNVGRVAQEWLLLRCSCPLYSRLLGWGASSPSTAVIVHLASDQTRPSSFSRRAALHFLALCRPDSTASDWSAPFLFTNPSQPSSVQRYSSSSNSGVSPTSVTIPAPPARQDPSQHPPSRKRPIKEPSGDTSVPSQAASQATQPAQAAPAAASSSTKRARFESSSGGAPFTPSSSTASTLIHTSAPLTPFQDALAGPHYVPLPPTRAISTSRAYPPPQSASSTGSQSHLPTDPLAPHSNPESPATSSSAPAPRQSSSTRMLISDESVRALYFAPTPMLVLDHNRRIRMMNRPCESIFLMTGVSCMGQMMEKLIIENHRADFYTAIQEASQVRATAAWAPPVLTRLTFLQDDQKMFSADMAISAWHPTDEVFSETFNSHFAKSLTSDAEKQAGNEQPPFTTPNRSDSIESRGAPLPHESYFTISIVPTRLAERRMSPADLQLSKAEQLKEGVFHTIETAIMALSSDGSTVIRNRACDEMLKMFEKKNPQDKPKKQEQPKPHKEGVEVDLSWLSDVMVCYTEDFSEPFPEQNWPIYRAAILGQFTKPVRIGCVATDTGVRRVYEIVAKPIRDAGGFGHHIGGVITLVDVTDTEKKYRLEVEKKGEEYFRTICDSMPQMLWTAGPDGTVDWFNEGWYRFTGLDSQTLFSLGWQQCFHEDDMAETNAHWSHSLRTGEPYQVMYRARRHDGVWKWMLGRALPVREPGSNKVIKWYGSCTDCDSEVKALEASRKSQTQLTSVINHAHVTIWAIDLDAIITIAEGPGVRSLRLAPGTPNGSDGDGSGSGSGNSLSGSLGAGTVNARSDESKDAESQTNSQSVVSGPGKRAAQRSMIGRSIYEVWDSPGIREAIGRALNGESVVQEMEIEGRWFRTQYTPQREESYDHEANEGTIIGVVGASMDITDRRRAELKLEESMHERSRALAAETAAKEASRIKSEFLANMSHEIRTPIAGVIGLSELLCDTQLSQEQRDFAENIQRSADALLTVINDILDFEKLELGKMDLEKTAFNLNVVIMDTQKMLTFATQKKGLEFRNECQLNFTGQIVGDAGRLRQVLTNLLTNAIKFTAVGSITLRVIETYEDQKSLHVHFEVRDTGCGISQATLKRLFQPFSQADPSFARRFGGTGLGLSICKNLVDLMGGTIGLESVENKGSNAWFSIPFEKVQTLESSGDSSPDEEAIPEIQMDEATSTLGVSENPLQRPRKDIWILVAEDNLINAQIALRTLKKMGFSCKVAKDGLEAIDEVGKRSYDLILMDCHMPNCDGYEATKRLRKSDSVDIRTTPIIAMTASAIRGDREKCLAAGMSDYLSKPVKSAALESTLVKWLFDPSTRQSLSRYVAPPMHGDYFGSKRPGGGLEITIPGPGEPGSPPRLIERDSTETVMGPHSIQSGRRGSFNPIAEREAVAAEIAASATPVGGVSSRSVEFASLSSEAGSATPEVISHEGHSAISASDEDGASGAEEQQASTVAQRTSQGDRRGCRTDQASTGT

SEQ ID NO: 29745 - protein, 215 aa, Kluyveromyces lactis NRRL Y-1140
MSASFVTVRSKAISLESQTDSLLTKYSSFAQTTSSEPSGQETQLQEKLEKILNQRQETVESLQRIADSESNISTSKLSQLQRHRETLQDNWQTFRDIRSSIQQERNRLNLLFSVKKDLQNSASDNQNEYIQDEARRVENSHTVVDSLIDQAYETREQFMSQRVFLQRSSDRILQTLQHIPLINNVISKINTRRKKNAVILASLISICILVLFFTA

SEQ ID NO: 29746 - protein, 184 aa, Idiomarina loihiensis L2TR
MSRHFDEAKGLSEQHDPATHDFVFNQTMFRIKDPERTLKFYSEVLGMTLVKRFDFPEMEFTLYFMAAMSPEQRKGWSTDHDKRIEQTFGRPAMLELTHNWGDENDDSVSYHSGNEEPKGFGHIGFAVPDIDAACERFEKMGVEFQKRPNDGKMKGIAFIKDSDGYWIEIFTPDRQPELLKEHLK

SEQ ID NO: 29747 - protein, 873 aa, Saccharophagus degradans 2-40
MGKLPERLRENVRILGDLLGETLLEHEGPALFRKVEEIRALAKSLNKGTASDASQLVDLLSQLEDKDILPIVRAFNQFLNLANIADLEYFSSADAQDNDGLDTLLTKLSSDVGKDQLYDLMSTLRIDLVLTAHPTEVTRRTLIRKYEKIARTLSDLTRGDLLTYESNKLQGRLHRLVEEVWNTNEIRDERPTAVDEAKWGFAVIENSLWHAVPDFIRHFDRLSRRRLGQALPLDLQPFKFYSWMGGDRDGNPNVTHKVTEEVIMLGRWKAADLYLQDLYELGGDLSMHEASDELLANLPNGASPTPYRERLHALRKRLEVTLDWTERTLAGENLPEPENAIHHRDDLLKPLLDIHSSLIESGFEHIANGPISDTLRRIYAFGISLAPLDIRQDSDRHVQVLDELTNYLEMGSYREWDEEKRQAFLLEQLNSKRPLLPANWPVSDDSAEVLATCKAIARQPQETLSHYVISMARQASDVLSVALLLKESGVTWDMPIVPLFETLSDLENGASVMNTLWQMHWYQRYTQGHQTVMIGYSDSAKDAGKFSATWAQYKCQEKLVDLANQYEINLVLFHGRGGTVGRGGGPVEKAMASQPPGSVAGRIRVTEQGEMIRYKFGLPRVAFRSLSNYACATIKATVTPNPAPKEQWRALIEDMSDASLEGYRSIVRGHKHFVPYFRSLTPEQELNKLALGSRPAKRKATGGVESLRAIPWVFAWTQVRLNLPGWLGAHQALQHALKEQPDLLQEMLTEWPFFSSFIDLLEMVLGKADSAICGHYERQLVDEEYRDLGEFLRGDLVALAQLIKEIKNQPALLEDDPMLQQSINVRKPYIDPLNYLQAELLKRERSAGEISPELEQALKVTMAGISAGMRNTG

SEQ ID NO: 29748 - protein, 181 aa, Brassica napus
MASVMLSSATMASSPAHATMVAPFIGLKSSAAFPVTCKANTKVTSITSNGGRVNCMKVWPPVGKKKFETLSYLPDLTDVEIAKEVDYLIRNKWTPCIEFELEHGFVYREHGNIPGYYDGRYWTMWKLPLFGCTDSTQVLKEVKKCKQESPNPFIRIIGFDNNRQAQCISFFAYKPPSFTDA

SEQ ID NO: 29749 - protein, 479 aa, Escherichia coli K12
MSVPVQHPMYIDGQFVTWRGDAWIDVVNPATEAVISRIPDGQAEDARKAIDAAERAQPEWEALPAIERASWLRKISAGIRERASEISALIVEEGGKIQQLAEVEVAFTADYIDYMAEWARRYEGEIIQSDRPGENILLFKRALGVTTGILPWNFPFFLIARKMAPALLTGNTIVIKPSEFTPNNAIAFAKIVDEIGLPRGVFNLVLGRGETVGQELAGNPKVAMVSMTGSVSAGEKIMATAAKNITKVCLELGGKAPAIVMDDADLELAVKAIVDSRVINSGQVCNCAERVYVQKGIYDQFVNRLGEAMQAVQFGNPAERNDIAMGPLINAAALERVEQKVARAVEEGARVAFGGKAVEGKGYYYPPTLLLDVRQEMSIMHEETFGPVLPVVAFDTLEDAISMANDSDYGLTSSIYTQNLNVAMKAIKGLKFGETYINRENFEAMQGFHAGWRKSGIGGADGKHGLHEYLQTQVVYLQS

SEQ ID NO: 29750 - protein, 339 aa, Candidatus Protochlamydia amoebophila UWE25
MAVNIAINGFGRIGRLVCRLAIEREDIRIIAINDLVPADNLAYLLKFDSTHGRFKGEIKVEENAIHVNGKKILIFSEKDPQNLPWNDLKIDYVVESTGLFTTSELAGKHLIAGAQRVVISAPAKGDVPTFVMGVNEKNYNPATDRIVSNASCTTNCLAPITKVLLDNFGIDEGLMTTIHAVTASQPTVDGPSKKDWRGGRGASQNIIPASTGAAKAVALCLPQVKGKLTGMAFRVPNADVSAIDLTVRLSKETSYEDICQAMKNASEGAMKGILAFCDEQVVSSDFISSPYSAIFDKDAGITLNSKFYKLIAWYDNEMGYACRVIDLVSYMNCCNNNSL

SEQ ID NO: 29751 - protein, 366 aa, Rhodospirillum rubrum ATCC 11170
MAEIRRIGVLTSGGDCAGLNAVIRAVTHRARRAYGWKVFGILDGTMGLMDRPLRYRELDSEMFSGFDILRAGGTVLGTVNKGDPFAFPMADGSKTDRSLDFVDGFHSLELDALVVVGGDGSMRILKKLCDKGSIGMVGVPKTIDNDVHGTEYAVGFSTATNVVTEALDRLQATAASHHRVMILEVMGRDAGHIAVSAGIAGGADVILIPEIPYTLEGVAKRIREVQQEGRSHALIVVAEGVLTPEGERATVAYAGGQTRYGGISQYLSDRIAQDTGTETRVTILGHVQRGGIPSMRDRLLASAFGVHAVDLVAARKFGRMVAWQDRGVVDVPLEEVCIGPRSLDPNGTLVHAARGLGIYVGEIGAA

SEQ ID NO: 29752 - protein, 222 aa, Arabidopsis thaliana
MRVSKSLILITLSALVISFAEAYDPSPLQDFCVAIDDLKNGVFVNGKFCKDPKQAKAEDFFFSGLNQAGSTNNKVRSNVTTVNVDQIPGLNTMGISLVRIDYAPYGQNPPHTHPRATEILVLIEGTLYVGFVSSNQDNNRLFAKVLYPGDVFVFPIGMIHFQVNIGKTPAVAFAGLSSQNAGVITIADTVFGSTPPINPDILAQAFQLDVNIVKDLEAKFRN

SEQ ID NO: 29753 - protein, 981 aa, Xylella fastidiosa Ann-1
MMSHTLSSLRDLEYHGAFVERHIGPNDVEIAHMLRVVGYDSLESLTDAIVPEKIRSTVALDLPKGITEEEALAKIRVIANKNRVFRSFIGQGYYGTHTPKVILRNILENPAWYTAYTPYQAEISQGRMEALINFQTMCADLTGMEIANASLLDEATAAAEAMSLAKRSAKSRSDLFFVHDAVHPQTLELLRTRAEPLGIVLRVGTPEEALQADVFGILLQYPDTFGRIGDHRVLANAVHAQGGLVVVASDLLALTLITPPGEWGADIVVGNSQRFGVPFGFGGPHAGFMACRDIYKRSIPGRLIGVSVDAAGHPAYRLALQTREQHIRREKATSNICTAQVLLAVMASMYAVYHGPQGLLRIAWRTHRMAAILAAALRGAGLTVGEYFFDTLHIVGIDAVAIHCAAAAAGMNLRMIDNAQLGISLDETVTRSDVVALGQVFGVQVDVEALDAITADALPAGLLRSSAFLTHPVFNTHHSEHELLRYLRMLADKDLAMDRTMIPLGSCTMKLNATAEMIPVTWQEFACIHPLAPVVQWSGYRQLIDELEAMLAECTGYDAISLQPNSGAQGEYAGLLAIRAYHRSRGEERRNVCLIPESAHGTNPASAQLCGMQVVIIKCDRSGNVDVDDLRMKAEKYSDTLAALMVTYPSTHGVFEEAITEICEIVHAHGGQVYTDGANMNALVGVAKPGRWGSDVSHLNLHKTFCIPHGGGGPGVGPCAVKAHLAPFLPKTLPLPGDAAGLPVQGTQEAKVGMVSAANFGSASILPVSWMYITMMGAAGLRKATQVALLNANYIAKRLAPHYKTLYTGRHGLVAHECILDVRSLEKVSGVSAEDIAKRLIDFGFHAPTLSFPVAGTLMVEPTESESQQELDRFVDAMIQIRGEIAAIEKGHLDPEDNPLKQAPHTAVQVMASQWEHAYSRELAAFPLGVLHHAKYWPPVARVDNVYGDKHVMCACIPVEAYKEKEDSEIQDLIEEDASRC

SEQ ID NO: 29754 - protein, 195 aa, Oryza sativa
  misc_feature (94)..(94): Xaa can be any naturally occurring amino acid
  misc_feature (115)..(117): Xaa can be any naturally occurring amino acid
  misc_feature (129)..(129): Xaa can be any naturally occurring amino acid
  misc_feature (136)..(136): Xaa can be any naturally occurring amino acid
  misc_feature (139)..(139): Xaa can be any naturally occurring amino acid
  misc_feature (143)..(143): Xaa can be any naturally occurring amino acid
  misc_feature (145)..(145): Xaa can be any naturally occurring amino acid
  misc_feature (147)..(148): Xaa can be any naturally occurring amino acid
  misc_feature (151)..(152): Xaa can be any naturally occurring amino acid
  misc_feature (154)..(155): Xaa can be any naturally occurring amino acid
  misc_feature (157)..(160): Xaa can be any naturally occurring amino acid
  misc_feature (162)..(163): Xaa can be any naturally occurring amino acid
  misc_feature (166)..(167): Xaa can be any naturally occurring amino acid
MKNIPVLLGLLSVWNVSFLGYPARAILPYSQALEKFAPDIQQLSMESNGKGVSIDGVQLPFESGEIDFGEPGTNGQHSFYQLIHQGRVIPCDFXSVSVKSQQPVYLKGEILSNHXXXLNVPFSFAQPDXVCLWESXLTXGLAXKXPXXLSXXGXXGXXXXVXXLLXXCDLAGDRPGFRGCLGGGIGNCGRSFWGF

SEQ ID NO: 29755 - protein, 109 aa, Glycine max
  misc_feature (28)..(28): Xaa can be any naturally occurring amino acid
  misc_feature (44)..(44): Xaa can be any naturally occurring amino acid
  misc_feature (80)..(81): Xaa can be any naturally occurring amino acid
EIFGGYLYFHKAPNKEEFHIETYHKIKXLHQYNYLRANKSTFTXNLEAHIPFLDKAFINTTISINPKSKIIKRNKRRIKXXILKRAFNNKEHPYLPKHILYRQKKQFSN

SEQ ID NO: 29756 - protein, 295 aa, Zea mays
MASSIVTSSFKPLAMADSSSSTIFSHPSLSTISPRCSFLTNLPLSFSRVSLSLKAKTNLKKSPFVSFVAQTSDWEGEEGGDVSASVAVEENEPEATFSEEEGDVSEGGDFPEPPEEAKLFVGNLAYDVDSQALAMLFEQAGTVEIAEVIYNRETDQSRGFGFVTMSTVEEAETAVEKFNRYDLNGRLLTVNKAAPRGSRPERQPRVYEPAFRVYVGNLPWDVDNGRLEQVFSEHGKVVEARVVYDRETGRSRGFGFVTMSNETELNDAIAALDGQNMEGRAIRVNVAEERPRRGF

SEQ ID NO: 29757 - protein, 161 aa, Xanthomonas campestris pv. campestris str. ATCC 33913
MTTLSTYQFTDLDGQPQSLAEYAGKVVLVVNVASKCGFTPQYAGLQALWQRYRDRGLVVIGFPCDQFGHQEPGDAADIRQFCSLDYAVDFPLAAKVEVNGSGAHPLWQWLKHEKRGVLGSEAIKWNFTKFLIGRDGSVLERYAPTTKPEALAADIERALGA

SEQ ID NO: 29758 - protein, 423 aa, Streptomyces avermitilis MA-4680
MSPTNRTVVVTGIGATTPLGGDVASTWEGLVAGRSGVRPLEQEWAAEQAVRIAAQIAVEPGEVIPRPQARRLDRSAQFALIAAKEAWADAGFTDKAGADPAVDPDRLGTVIASGIGGVTTLLDQYDVLKEKGVRRVSPHTVPMLMPNGPSANVGLAVGARAGVHTPVSACASGAEAIGYAIEMIRTGRADVVVAGGTEAAIHPLPIAAFGNMMAMSKNNDDPQGASRPYDVARDGFVLGEGAGVIVLESAEHAAKRGARVYAEAVGQGISADSHDIVQPEPEGRGISHALQNLLDSTDLNPAEIVHVNAHATSTPAGDVAELKALRKVFGDDADHFAVSATKSMTGHLLGGAGGVESVASVLALYHRVAPPTINVDNLDPEAEANADIVRGEARKLPVEGRIAALNDSFGFGGHNVVLAFRTV

SEQ ID NO: 29759 - protein, 1141 aa, Phaeosphaeria nodorum
MAGTEPIITQGIEPSSGESHSPPGERHVSATWGSKDGNISNAEWNDPEANKLPEKVAELEKKGEINQDGQRKKIVVVGLGMVGIAFIEKLMKYDVKRREYDVVVIGEEPHLAYNRVGLTSFFQHRLVENLYLNPKEWYSSMPEGSLNYHLNTMVTEIDSYNKTVKTSSGDTVPYDILVLATGSDALLPRHTPGHDAKGVFVYRTIEDLQNLIEFASSRKGTTGAVVGGGLLGLEAAKAMMDLEDFGQVRLIERNRWVLSRQLDGDAGGMVVEQVRALGLDVMLSKRVGKILTTEENAVKGVVFEDGEEMECSCISFAIGIKSRDELARKSGIKCADRGGGIVVGSDLTTSKPDIYAIGECASWENQTFGLIAPGVEQADVLAFNLTQAKAHAPRKFKSPDLSTKLKLLGVEVASFGDFFADRDGPKNMPGRQRAEKKEAGGINVKALTYKDPFQQVYKKYLFTMDGKYLLGGMMIGDTKDYVKLVPMVKNQKPLDMPPSELIIGASKGDDDGSDLTDDTQICSCHNVTKGDVVNSVKDGTCKSIGDVKSCTKAGTGCGGCMPLVQTIFNKTMASMGNEVKNHVCPHFEHSRADLFNIIYVKELKDFSAVMKACGKEPESLGCEACKPTIGSIIASLYNKHLLDLDRRGLQETNDRFLANIQRNGTFSVVPRVSGGEITPEKLIVIGMVAKKYNLYTKITGGQRIDMFGAKKHQLPEIWQELIDGGMESGHAYAKSLRTVKSCVGTTWCRFGIGDSVGMAVRLEERYKSIRGPHKIKGGVSGCVRECAEAQNKDFGLIATEKGFNIFVGGNGGAKPRHSELLAKDVPPDDVVPILDRYLSFYIRTADKLQRTARWMENLPGGIKYLQEVILEDKLGICADLEKQMEDLVGTFFCEWTEVLKDPKKRSWFSQFANTSETISDTIEPTQERGQERPSYWPKDSITEDFRGHKWTELSWQPLVKAEEFKDTDTGDSKAIKRGDTQLAVFKVRGKYYCTQQMCPHKRAFVLSDGLLGEDLASNKLWVSCPYHKRNYELSGDNAGKCANDESVNIAVFPIEERGDGYLYVKLPSVEELDSVLGTSKFVIKKSETEDPFVALDKKLERLALKGRKGTQVSHLENGLGEKGKAAMILAGGERGAGGLDW

SEQ ID NO: 29760 - protein, 482 aa, Salmonella enterica subsp. enterica serovar Paratyphi A str.
MQLNDSTLFRQQAFIDGDWRDARGGDVIPVSNPANGKPLGNVPKMGAEETRDAINAANRALPAWRALTAKERANILRRWFNLMMEHQDDLARLMTLEQGKPLAEAKGEISYAASFIEWFAEEGKRIYGDTIPGHQTDKRLLVIKQPIGVTAAITPWNFPSAMITRKAGPALAAGCTMVLKPASQTPFSALALAELAQRAGIPAGVFNVVTGSAGDIGGELTSNPLVRKLSFTGSTEIGRQLMEQCAKDIKKVSLELGGNAPFIVFDDADLDKAVEGALASKFRNAGQTCVCANRLYVQDGVYDRFAEKLNQAVNKLAVGDGLQADVAIGPLIDEKAVAKVQEHIADALEKGARVITGGEAHKLGGNFFQPTILVDVPDNAKVAKEETFGPLAPLFRFSDEADVIRQANDTEFGLAAYFYARDLSRVFRVGEALEYGIVGINTGIISNEVAPFGGIKASGLGREGSKYGIEDYLEIKYMCIGL

SEQ ID NO: 29761 - protein, 327 aa, Gloeobacter violaceus PCC 7421
MPVKLFYEALKDAMAEEMRRDPNVYVLGEDVGHYGGSYKATKDLYKEFGELRLLDTPICENAFTGLAVGSAMTGLRPIIEGMNMGFLLLAFNQIANNGGMLRYTSGGQFKIPMVVRGPGGVGKQLGAEHSQRLEGYFNNVPGLKIVHTSTVYNAKGLLKAAIRDDNPVMFFEHVLLYNLKEDIPEEEYLLPLDKAEMVKEGRDVTVLTYGRMRHHCTEALQELAARDIDVEVIDLISLKPLDLETIGRSLKKTHRVVIVEEDMKSGGVGAEIVASIDEHYFDYLDAPVLRLASKDVPVPYNGRMEATVIPQPQDIVRAVEEMALRAH

SEQ ID NO: 29762 - protein, 861 aa, Kineococcus radiotolerans SRS30216
MRTSIRTTSHGVAATTRTASAPSEASATTCRSGWESRTMRNPARTSCWSSTRTTRIGLIAGSVTSGTVTSGTVGKGRPHGETPAGARTRRHRPPVQAGALGHPHQALPARAGLQHGRRAPPVVLDAEAQRVVVPADHDVGAGPGPGVLEDVGQGLLHDPVGGQADRGRQVARPPDHLGVDLQPAGPDLLDEVGDHPRVRLGGALVARALAQHPEQVAHVAQRLPPGAGDGLEDPHRHGRVRARGVAPPVGLGDDHRQGVRHDVVHLAGDALALGGGGEAGLVLPLDLQQPGALDEGELVLPARPAQAAQRPGGQDHDADEHRGHHHRGHPAGAEEPQRAQGRAEQPEGQPAEGGPAPGVGGQGVDRDEHGDVPERRRGREDLEEAKEGHQGAGDLGEAAPHGQGQAHRQAHEPGERPPADAVGGAEEPGERGEHQRAEGVEEQAVGPRPPHEAVEDVQRGFPRHGPSVGIPAVAVVGPQDDPRGPPTGGGVHPSRRGDRMPDVRGRASATLARMVDTLRLAVIPGDGIGQEVTVEALKVLTAVLGGGGRVATTEYDLGARLYHRTGETLPDSVLEELRGHDAILLGAVGDPSVPSGVLERGLLLKLRFALDHHVNLRPSKLHPGVPSPLGDPGEIDFVVVREGTEGPYVGNGGALRVGTPQEIATEVSVNTAFGVERVVRDAFARAAARPRRKLTLVHKHNVLVHAGHLWRRTVEAVGAEFPDVAVDYLHVDAATIFLVTDPARFDVIVTDNLFGDILTDLAAAVTGGIGLAASGNVNPDRTTPSMFEPVHGSAPDIAGQQIADPTAAVLSVSLLLAHLGRDDLAARVEAAVAADLARRATGEVGTRSTSAVGDALAAAVG

SEQ ID NO: 29763 - protein, 417 aa, Glycine max
  misc_feature (281)..(281): Xaa can be any naturally occurring amino acid
MAMLPLTNPTPIRHNALSSSSFVQRKCVSLIPRIRTCDSEPQRRRFASVTCCSFSTLDSAKIKVVGVGGGGNNAVNRMIGCGLHGVEFYAINTDAQALLHSSAENPIKIGELLTRGLGTGGNPLLGEQAAEESKEAIANALQGSDLVFVTAGMGGGTGSGAAPVVARIAKEAGYLTVGVVTYPFSFEGRKRSLQALEAIEKLQKNVDTLIVIPNDRLLDMADEQTPLQDAFRLADDVLRQGVQGISDIIPIPGLVNVDFADVKAVMKDSGTAMLGVGVSFXNNRAEEAAEQATLAPLIGSSIQSATGVVYNITGGRDITLQEVNRVSQVVTSLADPSANIIFGAVVDDRYNGEIHVTIIATGFSQSFQKTLLTDPRAAKLLDRELGGQESKAVSPPLKSSNYPSTVASRASPRKFFF

SEQ ID NO: 29764 - protein, 133 aa, Glycine max
MAVPLLSKKIVKKRVKKFKRPQSDRKISVKTNWRRPKGIDSRVRRKFKGCTLMPNIGYGSDKKTRHYLPNGFKKFVVHNVKDLELLMMHNRTYCAEIAHNISTRKRKDIVERAAQLDVVVTNKTARLRSQEDE

SEQ ID NO: 29765 - protein, 336 aa, Oryza sativa
MKGLFKSKPRTPADVVRQTRELLIFLDLHSGSRGGDAKREEKMAELSKNIRELKSILYGNGESEPVTEACVQLTQEFFRENTLRLLIICLPKLNLETRKDATQVVANLQRQQVSSKIVASEYLEANKDLLDTLISGYENMDIALHYGSMLRECIRHQSIARYVLESDHMKKFFDYIQLPNFDIASDASATFKELLTRHKATVAEFLSKNYDWFFSEFNTRLLSSTNYITKRQAIKFLGDMLLDRSNSTVMMRYVSSKDNLMILMNLLRDSSKNIQIEAFHVFKLFAANKNKPTEVVNILVTNRSKLLRFFAGFKIDKEDEQFEADKEQVIKEISAL

SEQ ID NO: 29766 - protein, 274 aa, Glycine max
MWSALKRNYEVSEEIGRGRFGTIFRCFHPLSNQPYACKLIDKSLLLDSTDRHCLQNEPKFMSLLSPHPNILQIFHVFEDDHYLSIVMDLCQPHTLFDRMLHAPFSESQAASLIKNLLEAVAHCHRLGVAHRDIKPDNILFDSADNLKLADFGSAEWFGDGRSMSGVVGTPYYVAPEVLLGREYDEKVDVWSCGVILYIMLAGIPPFYGDSAAEIFEAVVKANLRFPSRIFRTVSPAAKDLLRKMISRDSSRRFSAEQALRHPWILSAGDTAELT

SEQ ID NO: 29767 - protein, 934 aa, Campylobacter jejuni subsp. jejuni NCTC 11168
  misc_feature (181)..(181): Xaa can be any naturally occurring amino acid
MSSVGENIKLTRRSFLKMAALSSLATPLLARSETLREASADELKEAYEGSKKVKTVCTACSVGCGIIAEVQNGVWVRQEIAQDHPVSSGGHCCKGSDMIDMVRSHVRLKYPMKKENGEWKRISYEQALSEIGEKLAAYRKENPESVMFLGSAKLNNEQAYYIRKFAAFFGTNNVDHQARIXHSATVAGVANTFGYGAMTNHLGDIQRSKCIIIIGANPAVNHPVGFRHFLKAKEKGAKLIVVDPRFTKSAAKADIYARIRPGTDIAFMYGMLKIIFDEGLEDTKYLDERVFGIDKIREEAAKWTVEEVENVTGISKELLVQITHEVAKNKPTTLIWAMGLTQHTVGTSNTRLAPIVQMVLGNIGKFGGGVNILRGHDNVQGASDMACLSENLPGYYPLNEATWRYYAKIWGVDYEWLLGNFVSKDWMHKTGLSLARWWAAALNGKDGNDAIDNAGTPLKALVVMGNGITSTAQQVKVKEGLEALELLVLADPFVNEAGIIAERKDGIYLLPAATQFETSGSVTATNRSGQWRFKVVDPLYESMEDQEILFELAKKLGFYEDFTKTLRDEKGEIVWPENATREIAKAVRSIGLNGWSPERLKKHTLYWDKFDEVTLEGKDEVAGEYYGLPWPCWSDKHPGSPVLYNTDIEVAKGGMGFRNNFGLEYEGESLLAKNAPLNSPIDTGYPQITKDNIEKVLGITLSAQEKEKMGSTWSYDDSNIIATKCIEKGIVPYGNAKARAVVWTFKDKIPLHREPLHSPRNDLVQKYPSFEDQKALYRVDTKFVSVQQAKDYSKEFPLNLVTARLVNLNGAGMENRASMYLTRLTPEMFCEINPELAKEQDIKAGDMIWVHSPEGTKIHVRVKVNPGVAKDMIFLPFHFTGVMQGVDLTHNFPEGTKPYASGESANTVTNYGYDIMCQIPETKGGLCRISKDGK

SEQ ID NO: 29768 - protein, 183 aa, Escherichia coli CFT073
MQDSILTTVVKDIDGEVTTLEKYAGNVLLIVNVASKCGLTPQYEQLENIQKAWADRGFVVLGFPCNQFLEQEPGSDEEIKTYCTTTWGVTFPMFSKIEVNGEGRHPLYQKLIAAAPTAVAPEESGFYARMVSKGRAPLYPDDILWNFEKFLVGRDGKVIQRFSPDMTPEDPIVMESIKLALAK

SEQ ID NO: 29769 - protein, 235 aa, Aspergillus oryzae
MPADTDPSLQFDSIEDTIKAFKNGEFIIVLDSQDRENEGDLIIAADSITPAQMAFLVRFTSGLICAPVSPEIASRLSLPQMVIENADPKGTAYTISVDSSDPSVTTGISAQDRALACRTLASPTARAEDFRRPGHIIPLQARSGGVRERRGHTEAAVEFCRLTGKVQAGVIAELVEDGELVPGVPEIGGNNGMMRRDGCLKFGKKWGIKVCTIEDLVDYVEKTEGSSSVVTNGKQ

SEQ ID NO: 29770 - protein, 424 aa, Bacillus subtilis
MAIEQMTMPQLGESVTEGTISKWLVAPGDKVNKYDPIAEVMTDKVNAEVPSSFTGTITELVGEEGQTLQVGEMICKIETEGANPAEQKQEQPAASEAAENPVAKSAGAADQPNKKRYSPAVLRLAGEHGIDLDQVTGTGAGGRITRKDIQRLIETGGVQEQNPEELKTAAPAPKSASKPEPKEETSYPASAAGDKEIPVTGVRKAIASNMKRSKTEIPHAWTMMEVDVTNMVAYRNSIKDSFKKTEGFNLTFFAFFVKAVAQALKEFPQMNSMWAGDKIIQKKDINISIAVATEDSLFVPVIKNADEKTIKGIAKDITGLAKKVRDGKLTADDMQGGTFTVNNTGSFGSVQSMGIINYPQAAILQVESIVKRPVVMDNGMIAVRDMVNLCLSLDHRVLDGLVCGRFLGRVKQILESIDEKTSVY

SEQ ID NO: 29771 - protein, 488 aa, Anabaena variabilis ATCC 29413
MNRHIQPWQRLLVLAIGSMVFAVFAPTIVQAANTPTLESLSETTIKLQISIDTTWVLLSGFLVFFMQTGFAMLEAGLVRQRSVVNTLLENFIDAAVTVLAWWAVGFGIAFGTSAGGLFGIDTFFLNQLPGADGSYPLGAPGSTAAINTYTLFFFQFAFAATASTITTGSMAGRTDFIGDLIYSAIMGAISYPIIVHWAWNSNGWLGKLSYHDFAGGSIVHTVGGWTALVGAYLLGPRPDRPPWGKLPPAHNLALATLGTMILWFGWYGFNPGSTLGTANPGLIGLVTINTTLAAGAGALTALIFLYVRTGKWDLVYCLNGSLAGLVAITAPCAYVAPWASVLIGFTGGISVVLGVSLIESLHIDDPVGAFSVHGISGMMGTLSIGFLGQAELTLNQKAGLFLGGGFDLLGIQMLGIVAITVFTVAFAFLMYGGLKAVGYLRVNAEADSIGIDAYEHGASVWPDIYPVEEVSKLQDQTKISENKTLEEQ

SEQ ID NO: 29772 - protein, 519 aa, Xylella fastidiosa 9a5c
MNTSISSQPPRIRIFDTTLRDGEQSPGCSMPAQQKLVMARALDALGVDIIETGFPASSQSDYEAMTLIARELRRPTLAVLSRCLQADIETSARALESATKPRLHVFLSTSPLHREHKLRMSKEQVLESVHKHVSLSRTLIDDVEFSAEDATRTEEDFLIEVTRVAIAAGATTINLPDTVGFSTPEEIRNMFTRIIANVEGANKVIFSAHCHDDLGLAVANSLAAIEGGARQIECTINGIGERAGNCALEELTMVLKVRNAFYNIDTSIHTSRIVSTSQLLQRLVGMPVQRNKAVVGANAFAHESGIHQHGMLRHRGTYEIMRPQEVGWVCSHMVLGRHSGRAAVEQRLRALGYLLEEEDLKLVFEEFKQLCEKQRLVTDVDLQVLMQDTTVQHGYRLASMTISDIGNRANALVELSDPQGQRVAETAQGNGPVDALFGALAAATGVKLELDSYQVHSVGIGADARGEANLSVRHNDTQYEGTGTSKDIIEASALAWLDVANRLLRNPENMQNKQNTALA

SEQ ID NO: 29773 - protein, 202 aa, Leuconostoc mesenteroides subsp. mesenteroides ATCC 8293
MADVEEIVKYMKTGGLIILVDDEDRENEGDLVGIGAKMSPENVNFMVTHARGLLCTPVGESITRRLGLTQMVANNTESNGTRFTFSVDAETVHGVTTGVSAFDRSATIRVLADPSSTEKDFVHSGHTFPLKALDGGFAVRNGHTEAAVDLAKLANEEPVGAICEILNEDGTMARLPQLLTMSKRFNLPLLSIKELTNYMEKI

SEQ ID NO: 29774 - protein, 527 aa, Xanthobacter autotrophicus Py2
MTDTSSAPVSGKPVSDRDRVVIFDTTLRDGEQCPGASMTFEEKLEVAALLDEMGVDVIEAGFPIASIGDFESVAEIARRTQNATVAGLSRAALNDIDRCAEAVKHARRGRIHTFLSTSPVHMKYKLQKQPHEVLEMVVASVTRARNHVEDVEWSSEDGTRTEIDFLCRCVEAAIKAGATTINIPDTVGYTTPAEYEALFRTVIERVPNSDKAIFSVHCHDDLGMAVANSLAGLAGGARQIECTVNGIGERAGNAALEEVVMAIETRSDVLPYRSGINTKMLTRASKLVSAVTSFPVQYNKAIVGRNAFAHESGIHQDGMLKHTQTYEIMTPESVGVSKTSLVMGKHSGRAAFRDKLKTMGYELGENALNDAFTRFKDLADRKKVVYDEDIEALVDQGIAAAYDRIKLISLSVIAGTRGPQRATMRLEVDGQVKTEEAEGNGPVDATFNAIKALVPHQVKLDLYQVHAVTEGTDAQAEVSVRLEENGKAVTARAADPDTLVASAQAYITALNKLHMKRQTMNPQSAVG

SEQ ID NO: 29775 - protein, 197 aa, Blastopirellula marina DSM 3645
MERLLAAGVKALHLDVMDGIFVPNISYGMPIVAAFRKLTDLPLDVHLMIEKPQDYIRQFHEAGADVMTIHAEAVDDVASILREIKSLGAGAGVAINPDTPLETIVDALPEADLALMMSVNAGFGGQKFNPVALDKIREVRRLAPDLLIEIDGGVNLDTIGRCTEAGADLLVVGSAIFGKPDYVTAVRELNSAAAAAS

SEQ ID NO: 29776 - protein, 422 aa, Triticum aestivum
MDKLKGSARLMIVSDLDHTMVDHHDEENLSLLRFGALWESVYCQDSLLVFSTGRSPTLYKELRKEKPMLTPDITILSVGSEITYGEAMVPDHGWEEYLNNKWDRNIVLEETAKFSELKLQVESEQRPHKVSFLVDKKNAQGVIKSLSEKFEKRGVDAKIIYSGGQDLDILAQGAGKGQALAYLLKKLGSCGKTPNNTLACGDSGNDAELFSIPGVHGVMVSNAQEELLQWHAENAKDNPKIIHATERCAAGIIQAIGHFKLGPNVSPRDVEFPYIKEDPFKPTAAIVKFYVLYEKWRRADVPKADSVIQYFKNITDANGVIIHPSGVELSIHSAIDELASCYGDKQGKKYRSWVDRLVILQTASDSWLVRFDLWEAEGAAWACCFTTLALNVKPETPGGFVVTHIHKTWRKEYPGVEQSCKL

SEQ ID NO: 29777 - protein, 183 aa, Brassica napus
  misc_feature (67)..(67): Xaa can be any naturally occurring amino acid
  misc_feature (84)..(84): Xaa can be any naturally occurring amino acid
MDCIVSSSTVLIRSHLTPIRSASSVSAKPLSSAKVASFASNRHILSFKSGGKRNRTLSTNASSSTIXRCGGIKEIAESEFTSTXLESDRPVLVNFVATWCGPCKLVYPATEALSQEYGDRLTIVKIDHDANPNLIAEYKVYGLPHFILFKDGKEVAGSRREGAITKAKLKEYIDGLLTSISVA

SEQ ID NO: 29778 - protein, 55 aa, Triticum aestivum
APPVSMAEKSISDALKCGKCAQKKVSYSQAQTRSADEPMTTFCECTVCGNRWKFS

SEQ ID NO: 29779 - protein, 205 aa, Volvox carteri
MSTKKRRVLKIIILGDSGVGKTSLMNQYVQKKFTKEYKATIGADFLTKEIEVDDKKVTMQIWDTAGQERFQSLGSAFYRGADCCMLVFDVNNAKSFDDLDNWRDEFIIQAGPSDPDNFPFVVLGNKIDEVGVNRQVTEKKAKAWCASKGSIPYFETSAKEDINVEAAFTCITRNALRNEKEEELFVPDAVDMNTSATQRKRGGCC

SEQ ID NO: 29780 - protein, 354 aa, Gossypium hirsutum
MVTSVLPRVESLASSGIQSIPKEYIRPQEELTSIGNVFEEEKKEEGPQVPTIDLTEIESEDKEVRERCQQELKKAAMEWGVMHLVNHGISEELMDRVRKVGQKFFELPVEEKEKYANDQSSGNVQGYGSKLANNASGQLEWEDYFFHLIFPEDKRDLSIWPKIPSEYTEVTSEYARQLRGLASKILSALSICLGLEEGRLEKEVGGVEELLLQLKINYYPKCPQPELALGVEAHTDISALTFILHNMVPGLQLFYQGKWVTAKCVPNSIIMHIGDTIEILSNGKFKSILHRGLVNKEKVRISWAVFCEPPKDKIILKPLPETVSETEPPLFPPRTFAQHIEHKLFRKTQDNLSN

SEQ ID NO: 29781 - protein, 368 aa, Triticum aestivum
  misc_feature (250)..(250): Xaa can be any naturally occurring amino acid
MSHATATADESVEFGRLLTGVLLTCHESNVYPSATVADAASALSSARHQSPTLARLSTMRSLGGLRAVSGHLAAASGASSSPHCVLFARALQILAQPEPVRLHKLSAPDSGIVELRLERPEARNAIGKEMLKGLRSAMDKVGADPTANVVLVASSVPKVFCAGADLKERRLMGPSEVREFVNTLRATFSSFEALPIPTIAVVEGAAFGGGLELALSCDLRICGESATFSLPETGLAIIPGYVSRMALYFXAGGTQRLPRIVGRARAKELIFTGRRFDATEAVNMGVVNYCVPGGEAYQKALELAREINQKGPLAIRMAKKAINEGMEVDLSSALAVEEGCYEQVLHTQDRLEGLAAFAEKRKPLYTGK

SEQ ID NO: 29782 - protein, 120 aa, Gossypium hirsutum
MASSMSLKLACVVVLCMVVGAPLAQGAVTSGQVTNSLAPCINYLRGSGAGAVPPGCCTGIKSLNSAAQTTPVRQAACRCIKSAAAGITGINFGLASGLPGKCGVNIPYKISPSTDCNSVK

SEQ ID NO: 29783 - protein, 480 aa, Synechococcus sp. RS9917
MTSVSTRDLVSQPYKYGFVTDIATDKIAKGLSEDVVRLISAKKGEPEFLLNFRLKAYRHWLTLEEPDWAALGYPPINYQDIIYYAAPKQPQEKKSSLDEVDPKLLETFEKLGIPLNEQKRLSNVAVDAVFDSVSIATTYKEKLAEHGVVFCSFAEAVKEHPELIERYLGTVVSSNDNYFAALNSAVFSDGSFVFIPKGVECPMELSTYFRINSGDTGQFERTLIVAEEGASVSYLEGCTAPMFDTNQLHAAVVELVALDDASIKYSTVQNWYAGDENGVGGIYNFVTKRGQCRGARSRISWTQVETGSAITWKYPSCVLQGADSVGEFYSVALTNNCQQADTGTKMVHVGPRTRSTIVSKGISAGRSSNSYRGLVQMAPSAKGARNYSQCDSMLIGDQAAANTYPYIRSQQPQAAIEHEASTCRISEDQLFYLQSRGIGFEEAVSMMVSGFCRDVFNQLPMEFAAEADKLLALKLEGSVG

SEQ ID NO: 29784 - protein, 611 aa, Kineococcus radiotolerans SRS30216
MPQQLPLDPKLPVAELTGAQSLIRSLEAVGVEVVFGLPGGAILPAYDPLMDSPHVRHVLVRHEQGAGHAAEGYAVATGKVGVCMATSGPGATNLVTPIADANMDSVPMVAITGQVAAKAIGTDAFQEADIAGITIPITKHNYLVTDPADIPRVIAEAFHLAATGRPGPVLVDVAKSALTATTSFAWPETVDLPGYRPVTRPHGKQIREAARLIAAAERPVLYVGGGVIKADASAELAALADLTGIPAVTTLMARGALPDSHPNNLGMPGMHGTVAAVTALQKSDLLITLGARFDDRVTGELSSFAPGAKVIHADIDPAEIGKNRAVDVPIVGDAKLVIAELTTAVAAEFENGRADLTAWTALTQSWKETYPLGYAESDDGTLAPQHVIARIGAIAGPEAIYVSGVGQHQMWSAQFVQYENPRTWLNSGGLGTMGYAVPAAMGAKVGKPDTVVWAIDGDGCFQMTNQELATCTLNGIPVKVAIINNSSLGMVRQWQTLFYSERYSNTDLNSGDHHGTHAAPIPDFVKLAEAYGCVGLRCDRAEDVDATIEKAMAIDDVPVVIDFRVHRDAMVWPMVEAGVSNDAIQYARGVSPVWDREEEGDNESGPEKVIS

SEQ ID NO: 29785 - protein, 507 aa, Musa acuminata
MSSGDSLNAELSEKTPVLGLRLWVVIGISVGVLIVFILCILSIWVTSRRKTRRTFDKLPVLQIPNVSKEITVDRVGTHSLAQSLQEHEGPFFSSYDKFSEKDSGKKLAHLTMSKSSDADNMSQCSSVHQNDRVGSSYSGDEGSSGHARKPYSPYSRVSASPLIGLPEFSHLGWGHWFTLRDLENATNRFSKENILGEGGYGVVYRGRLVNGTEVAVKRLLNNLGQAEKEFRVEVEAIGHVRHKNLVRLLGYCIEGTHRMLVYEYVNNGNLEQWLHGALHQHGVLSWENRMKVILGTSKALAYLHEAIEPKVVHRDIKSSNILIDEEYNGKVSDFGLAKLLGSGKSHVTTRVMGTFGYVAPEYANTGLLNEKSDVYSFGVLLLETITGRDPVDHGRPSNEVNLVEWLKLMVGNRRTEEVVDPNLDLKPPTRALKRALLVALKCLDPDSDKRPNMGQVVRMLEADEDRKSRRNRAASMEIESLKESNGSSDLENKVAGSDNWSCERFHA

SEQ ID NO: 29786 - protein, 518 aa, Crocosphaera watsonii WH 8501
MQDITRRVGNVSTDFKIVNSWVVILPTLLIVNCTLLNYNLSSMTNSVIFWHRRDLRVSDNIGLSKAYQHSSKLVGLFCLDTDILNQDNVAPARITYMLGCLQDLRESYQQLGGQLLIFQGNPTQIIPQVADALKVDCVFWNNDVEPYSKKRDNQVIEALQERGIHSQTYWDQLLHAPGDILTKSNNAPYKVYTPFWRSWLKEEKANIAQALGKLESLSEEEINTVKNLGIIDLPTAKDLGYSWDAPLILEPGETAAKEQLNYFCDSLIYNYQEQRNYPGINGTSTLSPAFKFGVIGIREVWQATLSAYENTYSDEARENIQTWQQEIAWREFYQHCMYFFPELATGPYRQEFKDFSWDNNEQHFQAWCEGKTGYPIVDAAMRQLNETGWMHNRCRMIVASFLTKDLIINWQWGEKYFMQKLIDGDLSANNGGWQWSASSGMDPKPLRIFNPASQAQKYDPDGEYIRLWVPEISSLDTEYLVTGKIPPLEAHSCGYLQPIVDHKQQQREFKERYKQIKN

SEQ ID NO: 29787 - protein, 337 aa, Arabidopsis thaliana
MGVDYYKVLQVDRSASDDDLKKAYRKLAMKWHPDKNPNNKKDAEAMFKQISEAYEVLSDPQKKAVYDQYGEEGLKGNVPPPDAGGATYFSTGDGPTSFRFNPRNADDIFAEFFGFSSPFGGGRGGTRFSSSMFGDNMFASFGEGGGGGGGSMHHGGARKAAPIENKLPCSLEDLYKGTTKKMRISREIADVSGKTMQVEEILTIDVKPGWKKGTKITFPEKGNEQPGVIPADLVFIIDEKPHPVFTREGNDLIVTQKISLVEALTGYTVNLTTLDGRRLTIPVTNVVHPEYEEVVPKEGMPLQKDQTKRGNLRIKFNIKFPTRLTSEQKTGVKKLLG

SEQ ID NO: 29788 - protein, 558 aa, Zea mays
MTKSFAVKLGQGGFGAVYKGSLHDGRQVAVKMLKDTQGDGEEFMNEVASISRTSHVNVVTLLGFCLQGSKRALIYEYMPNGSLERYAFTGDMNSENLLTWERLFDIAIGTARGLEYLHRGCNTRIVHFDIKPHNILLDQDFCPKISDFGLAKLCLNKESAISIVGARGTIGYIAPEVYSKQFGTISSKSDVYSYGMMVLEMVGARDRNTSADSDHSSQYFPQWLYEHLDDYCVGASEINGETTELAGRLQMVNAIFSSLPTYYMCTLELPKTVIKHIDKLRRHCLWREAHINAKKPPQVAWKTVCKPKIQGGLGVINLELQNKALLMKNLHKFYNRADILWINIIWANHYSHSLPSDKPVGSFWWRDVLKTLEFFKGIARVEIGDGKTIFLWHDNWDGMRKLAQYLELWSFASSKDITIHQARLAASHEMFHTPLSAKAFEQFQALHDLLVNLSHNNQRDKWLCNGFSSLFSSQKAYSHLTGNQWTHPIFTWMWKSKYQPKHKIFFWLLLKDRLNTRALLRQRAMPLDSYTCDNCILQAEETVLHLFSDAALLGDASS

SEQ ID NO: 29789 - protein, 710 aa, Prochlorococcus marinus str. MIT 9313
MGLRLLHLHLHGLFRSHDLELGRDADTGGQALYVLELVRGLAARSEIEQVEVVTRLIHDRRVSTDYANPIEDIAPGAKIIRLPFGPRRYLRKELFWPYLDDLADQTVSHLQQQEHLPDWIHAHYADAGYVGALVSRRLGVPLVFTGHSLGREKLRRLLGVGGDHEQIEQTYAIGQRIDAEEFTLAHCSLVITSTRQEIDHQYARYGRFVPEQAEVVPPGVDSIRFHPLQSSSETDVVDGLLAPFLRKPSLPPLLAISRAVRRKNIPFLVEAYGRSPVLRQRHNLVLVLGCRDDPRQLEKQQREVFQQVFDLVDRYDLYGRVAYPKQHRRDQIPAIYRWAALHRGLFVNPALTEPFGLTLLEAAACGLPMVATDDGGPRDILARCDNGLLVDVTDLEALQDVMEQAGSDADQWRLWSDNGIVAVSRHFSWDAHVCHYLALMKQRLELSQPRIWATDKECLGSPLGQSLLLLDLDSSLEEPEAEGLASLREGLESIGSGDAHGLGVLTGRSVQAAKKRYAELNLPSPRVWISRAGTEIHYGLEDQSDRFWQAHIDVDWRRQAVVSALADLKDHLTLQDDQEQGPHKVSYLLKEHGEAILPLVRQRLRQRSQAARPHLRCHWFLDVVPLRASRSEAIRYLSLRWGLPLEQILVVASQQGDAELVRGLTASVVLAEHDPCLEGLRHQQRVFFANNPHLFGLLDGLNHYRFFLKS

SEQ ID NO: 29790 - protein, 588 aa, Zea mays
  misc_feature (560)..(560): Xaa can be any naturally occurring amino acid
  misc_feature (572)..(572): Xaa can be any naturally occurring amino acid
MCGILAVLGCSDCSQARRARILACSRRLKHRGPDWSGLYQHEGNFLAQQRLAIVSPLSGDQPLFNEDRTVVVVANGEIYNHKNVRKQFTGAHSFSTGSDCEVIIPLYEKYGENFVDMLDGVFAFVLYDTRDRTYVAARDAIGVNPLYIGWGSDGSVWMSSEMKALNEDCVRFEIFPPGHLYSSAAGAGFRRWYTPHWFQEQVPRTPYQPLVLREAFEKAVIKRLMTDVPFGVLLSGGLDSSLVASVTKRHLVKTDAAEKFGTELHSFVVGLEGSPDLKAAREVADYLGTTHHEFHFTVQDGIDAIEEVIYHDETYDVTTIRASTPMFLMARKIKSLGVKMVLSGEGSDELLGGYLYFHFAPNREELHRETCRKVKALHQYDCLRANKATSAWGLEVRVPFLDKEFVDVAMGMDPEWKMYDKNLGRIEKWVLRKAFDDEEHPYLPEHILYRQKEQFSDGVGYNWIDGLKAFTEQQVTDEMMNSAAQMFPYNTPVNKEAYYYRMIFERLFPQDSARETVPWGPSIACSTPAAIEWVEQWKASNDPSGRFISSHDSAATDRTXTSWRWSTATGTXANGTVNGNDVAVAIAV

SEQ ID NO: 29791 - protein, 357 aa, Burkholderia xenovorans LB400
MNSAAQRPVFPFAALIGQAPLQQALLLAAIDPALGGVLVTGPRGTAKSTAARALAELLPEGQLVNLPLGASEDRLIGTLDIETVLRDGSVRFSPGLLAKAHRGVLYVDEVNLLPDALVDALLDAASSGVNTVERDGVSHSHDASFVLIGTMNPEEGELRPQLIDRFGLMVELQNCFEPSVRQAIVKARLAFDLDPQGFRAGYAQQQAAYVEQIHAARAALSQLAFDEAVHARVSALCIEAAVDGLRADLVMLRAARALAAFEQAATVTAEHVDRVAEAVLVHRRHSRESQADHDAREDDASAGAVERSSESSSSSARGDAQSADAAGDSDWGYLAPEPSATTHTHVKGVIPLNVKKR

SEQ ID NO: 29792 - protein, 518 aa, Anabaena variabilis ATCC 29413
MYQQKSRTRNRRFSTRNYAKSRQSNSQIQIFNLVKKLSPSWQACIPLACLIVLGWSYVAVAQAPAAGPTTAELKVALDTLWVAIAAFLVFFMNAGFGMLETGFCRQKNAVNVLAKNLIVFALATVAFWAIGFGLMFGDGNDFIGFNGFFLSGEDNSPATGDAYKGVFSALSWAGVPLAAKFLFQLVFAGTAATIVSGAVAERIKFVDFLIFSLLLVGIAYPITGHWIWGAGWLADRGFWDFAGSTVVHSVGGWAALMGAAFLGPRIGKYQDKQVVALPGHNMSIATLGCLILWLGWFGFNPGSVMAADPNAITHIALTTNMAGAVGGIAATITAWLYLGKPDLSMIINGILAGLVGITASCAYVSIPSSAIIGFIAGVIVVFAVTFFDKLGIDDPVGATSVHLVCGVWGTLAVGLWSVGPGVYSWYGEGLGPAKGLFAGGGLGQLITQFLGAAAVGGMTVLVSSIFWLALKATLGIRVTREEELEGLDIGEHGMEAYSGFLKEASPGGFAEGKTSDGY

SEQ ID NO: 29793 - protein, 203 aa, Arthrospira platensis
VQSNLRLVVSIAKKYMNRGLSFQDLIQEGSLGLIRAAEKLDHEKGYKFSTYATWWIRQAITRAIADQSRTIRLPVLLYETISRIKKTTKLLSQEMGRKPTEEEIATRMEMTIEKLRFIAKSAQLPISLETPIGKEEDSRLGDFIESDGETPEDQVSKNLLREDLESVLDTLSPRERDVLRLRYGLDDGRMKTLEEIGQIFNVT

SEQ ID NO: 29794 - protein, 319 aa, Lactobacillus johnsonii NCC 533
MKRIGILTSGGDAPGMNAAIRAVTRTALANGIEVCGIRYGYAGLVAGDIFQMTSETVADKISRGGTFLYSARFPEFKEEEVQLKGIEQLKKHGIDALVVIGGDGSYHGALKLTRHGYNAIGLPGSIDNDIPYTDYTIGFDTACNTAMEAIDKIRDTATSHQRVFVVNVMGRDCGDIAMHVGVATGADAIVIPEEPYDIKEIAENLKQGFANGKKHGIVVLAEGVMDAEKFKDELLKYGDFDARANVLGHMQRGGSPTMRDRVVASEMGAYAVKLLLEGKGGLAVGMENNKLTHHDILDLFDAKHHGNYALYSLNKDLAK

SEQ ID NO: 29795 - protein, 435 aa, Bacteroides thetaiotaomicron VPI-5482
MDEIVQFDFPTDSPKIIKVIGVGGGGGNAVNHMYREGIHDVTFVLCNTDNQALAESPVPVKLQLGRSITQGLGAGNRPERARDAAEESIDDIKEQLNDGTKMVFITAGMGGGTGTGAAPVIARIAKEMDILTVGIVTIPFIFEGEKKIIQALDGVERIAQHVDALLVINNERLREIYADLTFMNAFGKADDTLSIAAKSIAEIITMRGTVNLDFADVKTILKDGGVAIMSTGFGEGENRVTKAIDDALHSPLLNNNDIFNAKKVMLNVSFCPTSELMMEEMNEIHEFMSKFREGVEVIWGVAVDNSLDTKVKITVLATGFGVEDVPGMDTLHEARSQEEEERQLQLEEEKEKNKERIRKAYGESAGIGKKSLRSRRHIYIFNTEDLDNDDIIAMIEESPTYTRDKTKLLKIKTKAALEEEVAMEEATDNDGVITF

SEQ ID NO: 29796 - protein, 568 aa, Chromobacterium violaceum ATCC 12472
MRASQFFISTLKEAPADADITSQKLMIRAGFIRKQAAGIYSWMPMGLRVVRKVETIIREEMNRAGGIEVSLPVVQPAELWQETGRWDAMGAELLRFKDRHERDFALQPTAEEVITDIARRELRSYRALPKNFYQIQTKFRDERRPRFGVMRGREFTMKDAYSFDRSAEDAGKSYDNMYAAYRRIFDRLGLTYRAVAADTGAIGGDRSHEFQVIADTGEDAIVYCPTSEYAANIELAEAVAPAGERPAASAALAKVHTPKVKTIAELVDFLKIDIKQTVKAVVVEGEQDEAVLMLVRGDHELNEVKAQKVAGIKNPLAFASPAAIRDAFGANPGSLGPVGFKGRVIADRTVAKMADFVIGANEDDQHYTGANFGRDCAEPEVFDIRNVVEGDPSPDGQGALAIQRGIEVGHVFYLGTKYSAAMNATFLDEDGKPKPFEMGCYGIGVTRILGAAIEQNYDDKGMIWPDSIAPFAVVVCPVGYDRSEAVKEAADKLYADLQARGVDVMLDDRGERPGAMFADWELIGAPHRVTIGDRGLKEGKVEYQHRRDSEATAVAADAILEHVLSKLA

SEQ ID NO: 29797 - protein, 126 aa, Zea mays
LRATIAAVLNSMKTPQVVSVLLMAALLASSASAAITCGQVGSSLAPCIPYATGRASALPSSCCNGVKSLNSSARTISDRQAACRCLKSLANSVKSVNMGTVATIPGKCGVSVGFPISMSTDCNKIS

SEQ ID NO: 29798 - protein, 310 aa, Escherichia coli CFT073
MMVRIYTLTLAPSLDSATITPQIYPEGKLRCTAPVFEPGGGGINVARAIAHLGGTATAIFPAGGATGEHLVSLLAHENVPVATVEAKDWTRQNLHVHVEASGEQYRFVMPGAALNEDEFRQLEEQVLEIESGAILVISGSLPPGVKLEKLTQLISAAQKQGIRCIVDSSGEALSAALAIGNIELVKPNQKELSALVNRELTQPDDVRKAAQEIVNSGKAKRVVVSLGPQGALGVDSENCIQVVPPPVKSQSTVGAGDSMVGAMTLKLAENASLEEMVRFGVAAGSAATLNQGTRLCSHDDTQKIYAYLSR

SEQ ID NO: 29799 - protein, 406 aa, Buchnera aphidicola str. APS (Acyrthosiphon pisum)
MRRVVITGIGIVSSIGNNKKEVLASLYKGVSGIVSSEEMKKLGMRSAVWGNIKLESINIITQKLSRFMNNASRYSFVAMMEAIKDAKIDREYYQKNPRVGLISGSGCSFSKNTLTSDIHLMKNKHISKGISPYLAVKTMPSGISACLSTLFKIYGVTYSISSACATSAHCIGNAFELIQFGRQDLIFAGGGEEISLELAMQFDAMRALSTCFNNDPKKASRVYDVYRDGFVISGGAGMLVIEELNSALSRSAYIYAEIIGYAATSDGSNIVVPSGDGAIRCMNLARKGKNIPIDYLNVHGTGTKIGDLIELEAIRKVFLNEKKPMISATKSMTGHGLGASGVHEMIYTLLMLKYNFIAPTINIENLEPCAENMNIIQKTTNIEINTAMSNSFGFGGTNVSLIVKKY

SEQ ID NO: 29800 - protein, 548 aa, Yersinia pestis KIM
MKNINPSQTAAWKALQQHFEQMKDVTISSLFAKDDQRFNRFSATFDDQMLVDFSKNRITSETLEKLQDLAKETDLAGAIKSMFSGEKINRTEDRAVLHIALRNRSNTPIVVDGKDVMPEVNAVLAKMKQFCDRVISGDWKGYTGKAITDVVNIGIGGSDLGPYMVTEALRPYKNHLNMHFVSNVDGTHIAEALKPLNPETTLFLVASKTFTTQETMTNAHSARDWFLSAAGDPAHVAKHFAALSTNAKAVGEFGIDTNNMFEFWDWVGGRYSLWSAIGLSIALSVGFEHFEQLLSGAHAMDKHFAETPAEKNLPVLLALIGIWYNNFFGAETEAILPYDQYMHRFPAYFQQGNMESNGKYVDRNGHPVDYQTGPIIWGEPGTNGQHAFYQLIHQGTKLIPCDFIAPAISHNPLSDHHAKLLSNFFAQTEALAFGKSLEDVEAEFAAAGKTPEQVAHVAPFKVFEGNRPTNSILLREITPFSLGALIALYEHKIFTQGVILNIYTFDQWGVELGKQLANRILPELADDQEVTSHDSSTNALINRFKNWR

SEQ ID NO: 29801 - protein, 335 aa, Glycine max
SARAGGLGLRALSKDQLDEILKPAECTIVASLSNDYVDSYVLSESSLFVYPYKIIIKTCGTTKLLLSIPVILKLADALDIAVKSVRYTRGSFIFPGAQSFPHRSFSEEVSVLDSYFSNLGSGSKAYVMGDPSKSQIWHIYSASAQTKGSSEAVYGLEMCMTGLDKESASVFFKENTSSAASMTENSGIRKILPQSDISDFEFDPCGYSMNGIEGSAISTIHVTPEDGFSYASFEAVGYDFNDMALGELVERILACFCPAEFSVALHIDMHGEKLNKFPLDIKGYYCGERSTEELGVGGAVVYQTFVQGCDGSASPRSILKCCWSEDENEDEVREI

SEQ ID NO: 29802 - protein, 452 aa, Campylobacter jejuni subsp. jejuni NCTC 11168
MDPSQVLDLNQTSTASFDAGYSILMVVVALALVFLNGFFVLSEFSIVKVRRSKLEEMVKEKKAGAKKALEVTSRLDTYLSACQLGITLSSLALGWIGEPAIAKMLEIPLINLGFSTVIIHTMAFIIAFSIITLLHVVLGELVPKSIAIAVADKAVLFIARPLHWFWMLFLPCIKIFDFLAAISLKLFGIKPAKESELTHSEEEIKIIASESQKGGVLDEFETEIIRNAVDFSDTVAKEIMTPRKDMICLNKQKSYEENMQIICEHKHTRFPYIDGSKDTILGMIHIRDIIQNELNHKSQNLDTFVKPLILVPENISISKVLVMMNKERSHTALVVDEYGGTAGILTMEDIMEEIIGEIKSEHEEDSYKKLAENIYEFQGRCDIETVEEMLVINYDEDLEQVTIGGYVFNLLGRLPMVGDRIEDELCYYEVKKMDGNSIERVKVVKKTNKDEE

SEQ ID NO: 29803 - protein, 364 aa, Pichia anomala
MSEKTIVVLPGDHVGTEITNEAIKVLKAIEEVRPNVKFNFQHHLIGGAAIDATGVPLPDEALEAAKKADAVLLGAVGGPKWGTGAVRPEQGLLKIRKELNLYANLRPCNFASESLLELSPIKAEFAKGTDFTVVRELVGGIYFGERKEDDGSGVASDTETYSVPEVQRITRMAAFMALQHNPPLPIWSLDKANVLASSRLWRKTVTETIEKEFPQLTVQHQLIDSAAMILIKSPTTLNGIVITSNMFGDIISDEASVIPGSLGLLPSASLASLPDTNKAFGLYEPCHGSAPDLPANKVNPIATILSAAMMLKLSLDLFEEGVALEKAVKEVLDAGVRTGDLRGSNSTKEVGDAAVEAAKRILKN

SEQ ID NO: 29804 - protein, 597 aa, Zea mays
MARLPLAACAVAAAFYLCLHLASSSSSAPRLAPAPSDGGRRAGRTAYHFQPAKNWQNDPNGPMYYNGMYHLFYQYNPHGALWGVGNLSWGHSVSGDLVNWAALDTALDPTSPFDANGCWSASATILPGGTPAILYTGIDANGEQVQNVAFPRDPADPLLRRWDKPGYNPVIPLPADVPGDKFRDPSTAWLGRDGLWRVAVSAEVRGVASTLVYRSADFLRWERAPAAAPLHASRAAGMVECPDLFPVKEEGDDGDGQGLDASASGAGVRHVLKLSVMDTLQDHYMVGRYDDAADAFVPAEPERGDDVRGWRRLDYGHVYASKTFFDARGSRRVLWAWANESDSQADDVAKGWSGTFPRKLWLDEDGKQLRQWPVEEIETLRRKRVVLHRGTALATGGMNEIVGVAGSQADVEVAFKVSSLAGAEALDPNWLLDPQKLCGEKGASVPGGVGPFGLIVMASSDLREHTAVFFRAIYRYHGRYKLLMCTDLTRSSTRAGVYKPPYGGFVDVDVEEHETINLRTLIDHSVVESFGADGRMCITARVYPEHAETSNSHMFVFNNGTGTVEVSKLEAWELAAATVNSVGGNDSLVMSESNGQS

SEQ ID NO: 29805 - protein, 422 aa, Streptomyces griseus subsp. griseus
MNRRVVLTGIGVVAPGGTGTKAFWELITSGGTATRPISLFDASPFRSRIAAECDFDPAAHGLTHKETRRMDRAAQFAAVATDEAVADAGLEFHRTDPARVGVTVGSAVGCTTSLEREYTAVSDGGRDWLVDHTYAVPHLYDHLVPSSMAAEVAWRVRAEGPASVVSTGCTSGLDAVAHARGLILEGSADVMVAGATDAPISPITLACFDAIKATTPRNDDPEHASRPFDATRNGFVLGEGSAMFVLEEYEHAVRRGARPYAEITGFASRCNAFHMTGLRPDGREMAEAIGRALAEAGARPDDIDYVNAHGSGTKQNDRHETAAFKAALGEHAYAVPVSSIKSMVGHSLGAIGAIEIAACALAVRHGVVPPTANLHEPDPECDLDYVPLRARHRALDRVLTVGSGFGGFQSAMVLAAPEERAS

SEQ ID NO: 29806 - protein, 231 aa, Streptococcus pyogenes M1 GAS
MVKLVFARHGESEWNKANLFTGWADVDLSEKGTQQAIDAGKLIKEAGIEFDLAFTSVLTRAIKTTNLALENAGQLWVPTEKSWRLNERHYGALTGKNKAEAAEQFCDEQVHIWRRSYDVLPPAMAKDDEYSAHKDRRYADLDPALIPDAENLKVTLERAMPYWEEKIAPALLDGKNVFVGAHGNSIRALVKHIKGLSDDEIMDVEIPNFPPLVFELDEKLNIVKEYYLGGE

SEQ ID NO: 29807 - protein, 820 aa, Methylococcus capsulatus str. Bath
MSKPKLVLVGNGMAGVRTLEELLKLAPGKYDITVFGAEPHPNYNRILLSPVLAGEKKLDDIILNDEDWYAGHGITLHKGKTVVAIDRGRRRVRTEDGTVADYDRLLLATGSTPFILPVPGRDLEGVVGFRDIRDVERMLEASEKHRHAVVIGGGLLGLEAANGLKKRGMNVTVAHLLDTLMERQLDKPAAALLQRALENSGLSFKLEAQTEALLGEGRVRAVRFKDGSEIPADLVVMAVGIRPNIELAKAAGIHCERGILVSDTMQTFDPQVYAVGECVQHRGELFGLVAPLFEQAKVCANHLAEFGIARYRGSVTSTKLKVTGIDLFSAGEYQGGPGFEELLFQDPSRGVYKKLVVRDNKVAGAVLYGDTVDGAWYFQMMRDGTDISAFREHILFGQAHVGDSGHGAESHAARLAEDAEVCGCNGVCKKTIVDAIIQKKLFTLDEVRAHTKASASCGSCTGLVEQLLQSTLGSDYSVSPAKKPLCRCTDLTHEEVREAVRTHGPKTIPQLMGALGWRTPDGCHTCRPALNYYLLCQWPGEYRDDPQSRFINERVHANIQKDGTYSVVPRIWGGVTNPRELRAIADVAEKFRVPCVKITGGQRIDLLGVPKARLPAIWAELGKHGLVSGHAYGKSLRTVKTCVGKEWCRFGTQDSTTLGIELEKMTWGSWTPAKVKMAVSGCPRNCAEATIKDFGVVAVDSGWELHVGGNGGVKVRATDFLCKVQTDEEVMEYAAAYLQLYREEARYLERTAHWIERVGLPYVHSRIVDDAEGRKALRARFLESQRKAQIDPWAERAQGAERHEFEPLTLRERNNHACIA

SEQ ID NO: 29808 - protein, 215 aa, Triticum aestivum
MRPGAEFVAVSHRVGAPTVAPAHGLINGTVAPHSPWQSPVPYLFGGLAAMLGLIAFALLILACSYWKLSGYLDGDRDGQAAGDADGENASASGAARPAMDFLEHVVVIMAGDERPTFLAKPAASRAAEVELATAAAAASALTGGEGQEKKVDEQGSEASSHLGADSARPSRDHHDTASRSHVHDQDAAGQSRDHHHDDQDAASQSSSTTLQESSQ

SEQ ID NO: 29809 - protein, 619 aa, Arabidopsis thaliana
MGASHSTNVNNHPHSRNASNHPLTNSNSTSSRHSASSSDRLSVSNLRSQLTTIYRNQEEEEEEEEEEEEEEEGGKEKRAEEEAKSFSLVRDFDLSGLNCIRVSRRNYILMDPHKKVALETEFFTEYGEASRYQIQEVIGKGSYGVVASAIDTHSGEKVAIKKINDVFEHVSDATRILREIKLLRLLRHPDIVEIKHVMLPPSRREFRDIYVVFELMESDLHQVIKANDDLTPEHYQFFLYQLLRGLKFIHTANVFHRDLKPKNILANSDCKLKICDFGLARVSFNDAPSAIFWTDYVATRWYRAPELCGSFFSKYTPAIDIWSIGCIFAEMLTGKPLFPGKNVVHQLDIMTDLLGTPPPEAIARIRNEKARRYLGNMRRKPPVPFTHKFPHVDPLALRLLHRLLAFDPKDRPSAEEALADPYFYGLANVDREPSTQPIPKLEFEFERRKITKEDVRELIYREILEYHPQMLQEYLRGGEQTSFMYPSGVDRFKRQFAHLEENYGKGEKGSPLQRQHASLPRERVPAPKKENGSHNHDIENRSIASLVTTLESPPTSQHEGSDYRNGTSQTGYSARSLLKSASISASKCIGMKPRNKSEYGESNNDTVDALSQKVAALHT

SEQ ID NO: 29810 - protein, 647 aa, Xanthomonas campestris pv. campestris str. ATCC 33913
MCGLAGLLLATPRMHGEQLEALVRPMGGALRHRGPDDAGTWCDAQAGVALAHQRLSILDLSPLGHQPMRSADSRYVLAYNGEIYNFAQLRAALAALGHRFRGHSDTEVLLAAVVEWGLDDTLARCNGMFALALWDERDHCLSLARDRVGKKPLYYGWAGDTLVFGSELKALWQHPDFDNGVDRDALTLLLRLGYIPAPACIHERTFKLMPGRVLRLDAQAVAAGAAAHRPDQAQQPFWNAREAMQRALAAPFTGTDAQAEEQLDSLLRDAVALRMVADVPVGVFLSGGTDSSIVTAMMQAQSDQPVHTFSIGFEGSHHDEAPLAREVATHLHTDHTELYVSGADALAVVPTLPDMFDEPFADASQVPTALVARLARGGVTVALSGDGGDELFFGYGRYQRALRNWRMHGLVPAPLRRLMAVAARKSGEASRTGGLAALVAEAGARGIGDIYRNRISRWRDPAAVVLGATEPDSFYSLADPLHGSGTPADAMMLADFAAYLPDDLLCKVDRTTMAVGLEARAPLLDWRVAEFAWSLPLSLKYRDGVSKYLLKRVLCRYLPEPMVYRGKRGFGAPVSAWLRGDLHGWADDLLAHGTLQREGVFAADTVAGLWRDFNGGERKWHTHLWTVLMFQAWQDHWRAQRAAIVRS

SEQ ID NO: 29811 - protein, 234 aa, Pelargonium x hortorum
CGRCWAFSTIAAVEGINHIVTGELISLSEQELVDCDRSYNQGCNGGLMDYAFEFIIKNGGIDSEEDYPYKAVDGTCDPIRKNAKVVTIDGYEDVPENDENSLKKAVAYQPVSVAIEAGGREFQLYQSGIFTGRCGTALDHGVAAVGYGTENGIDYWIVRNSWGSSWGENGYIRMERNVKTTKTGKCGIAMEASYPTKEGLNPPSPPPLLRLPLVPQQSATSTTRAPNKHMLLYI

SEQ ID NO: 29812 - protein, 469 aa, Methanosarcina acetivorans C2A
MLKNVQKLGKFLIIICMIFIALSSPAFAATAEENAVAIEGVQTALTFVWLLLASGLVFFMHAGFSLVETGLTRSKNTANILMKNFMTIVLGILIYWAVGWGVMYGADAAGLIGTDQFFLSGADNALWNGWFFQMVFAATGATIVSGAMAERTNFKAYLIYCIMMVAVIYPVYGHWVWSGADLALLTGADSPIVQAIGVPSHDFAGSGVVHSIGGYSALAGVLLVGARIGKFKDGKAVPIPGHNLTIAFLGTLILALGWIGFNGGSTLDGNDPYMNLVVVNTFLAAAAGAVVTMLITWMKTGKPDPSLTANGLLGGLVAITAPCGSVNNWAAIIIGAIAGIIIYAGVMFNENTLKVDDPVGAIAVHGYCGSWGLISVGLFSIGIGNGILADAAYAAEVPGLFYGGGISLLLIQLISVLCSIVWAFGISFIIFKILDAVVGLRVSEEEEIMGLDICEHGIRAYPEYLMREE

SEQ ID NO: 29813 - protein, 112 aa, Methanosarcina acetivorans C2A
MCKVEAIIKPLKLHQVKDALEESGFPSLTVTDVKGRGQQKGIVQQWRGKKYCVDLLPKTKVEVVVPEEEVEKIIQVIQSTAYTGEIGDGKIFVIPIETVVRIRTGERNGDAL

SEQ ID NO: 29814 - protein, 222 aa, Burkholderia xenovorans LB400
MNPIGWREYESAPQANPATLEALRELAVSLLSDNMARASGMVGLRPYHQPRAMAGTAVTVHTRPGDNLAIHRAFDFCRPGDVLVIDGAGELTQALMGEIMASFAASLGVQGLVIDGAIRDVGALRQRDFPVYARGVTHRGPYKNGPGEINVPVTVGGTVVHPGDIIVGDEDGLLAIAPADAEAVIAGARRQHAKEMAALKSIADGGFDRSWVVPHRQRMMNN

SEQ ID NO: 29815 - protein, 321 aa, Haemophilus somnus 2336
MIKKIAVLTSGGDAPGMNAAIRGVVRSALSEGLEVYGIYEGYYGLYHNKIQQLTRYSVSDIINRGGTFLGSARFPEFKDPAVREKCVEILRSHGIDALVVIGGDGSYMGAKLLTEEHDFPCVGIPGTIDNDVAGTDYTIGYQTALETAVEAIDRLRDTSSSHKRISIVEIMGRHCSDLTISAAIAGGCEYIVASEIEFNREELIKQIERAIIKGKRHAIIAITELLCDVNELAREIEARVKHETRATILGHIQRGGTPCAFDRILGSRMGVYAVDLLLQGKGGYCVGIQNEQLVHHDIIDAINNMRREFKADWLAMSKRLD

SEQ ID NO: 29816 - protein, 242 aa, Oryza sativa (japonica cultivar-group)
MGRSFRDSLKVLEADIQHANSLAAEFRREYDGACLQMRMSYCPAAHFFLFLVQWTDCNLAGALGLLRILIYKVYADGTTTMSAHERKASIREFYAVIFPSLMQLHEGINEVEDKKQKAICIERYRRRDEDQKMVISEIDDNIEEECGICMEINGKVVLPTCSHAMCIKCYRDWRSRSQSCPFCRDSLKRVNSADLWIYTDNRDIVDIATVRKENLRRLFMYIDKLPTVIPETVFDVYDSHVK

SEQ ID NO: 29817 - protein, 319 aa, Listeria innocua
MASEEKIYDVIIIGAGPAGMTAALYTSRADLDTLMIERGVPGGQMVNTAEVENYPGFDSILGPDLSDKMLSGAKQFGAEYAYGDIKEVIDGKEFKTVTAGSKTYKARAIIIATGAEHRKLGAAGEEELSGRGVSYCAVCDGAFFKNRELVVVGGGDSAVEEGTYLTRYADKVTIVHRRDKLRAQQILQDRAFKDEKVDFIWNNTVEEIIGDGKKVTSVKLVSTVDGSESIMPVDGVFIYVGLVPLTKAFLSLGITDEEGYIVTDEEMRTNLPGIFAAGDVRAKSLRQIVTATGDGGLAGQNAQKYVEELKEALEAEAAK

SEQ ID NO: 29818 - protein, 374 aa, Desulfitobacterium hafniense Y51
MKKYTIAVIPLDGVGKDVIPLGAKAMQKAQEILGGFELDCRYYEAGVEYAVKTGKMCEDNLGEDIAKADAMLCGSAGHYDADMSKSEYPGYKTGMQVLQFLRSGMGNSIGLRPLRLRKGIDCPLRNREEIDVLLVRQLAEGFYIRPGHMIGEDAAYDTIVVTRNVTEKFADTCFRLARGRHGRRQDGKKMVTLGNKHGNVTCFDFYRKIFTEVSAGYPDIGLQFTQVDALAEHLIKDPDRFDVIACENMIGDIIGDIGAYITGGMGITPTADVGGVTPQFRPNHGTFPRAVGKGFANPLASILTAGLLLDTLGNERGDDNLRRGARLIEKAVEDNLTTGGPRTKDLGGTANTFATAEAVFKAMEVVKICSKGER

SEQ ID NO: 29819 - protein, 270 aa, Staphylococcus aureus
GILVVSAADGPMPQTREHILLSRNVGVPALVVFLNKVDMVDDEELLELVEMEVRDLLSEYDFPGDDVPVIAGSALKALEGDAQYEEKILELMEAVDTYIPTPERDSDKPFMMPVEDVFSITGRGTVATGRVERGQIKVGEEVEIIGLHDTSKTTVTGVEMFRKLLDYAEAGDNIGALLRGVAREDVQRGQVLAAPGSITPHTEFKAEVYVLSKDEGGRHTPFFSNYRPQFYFRTTDVTGVVHLPEGTEMVMPGDNVEMTVELIAPIAIED

SEQ ID NO: 29820 - protein, 271 aa, Staphylococcus auricularis
AILVVSAADGPMPQTREHILLSRNVGVPALVVFLNKVDQVDDEELLELVEMEVRDLLSEYDYPGDDVPVISGSALKALEGDKEYEQKILDLMQQVDDYIPTPERDSDKPFMMPVEDVFSITGRGTVATGRVERGQIKVGEEVEIIGMKDGSQKTTVTGVEMFRKLLDYAEAGDNIGALLRGISREEVQRGQVLAAPGSITPHTKFTAEVYVLSKDEGGRHTPFFSNYRPQFYFRTTDVTGVVTLPEGTEMVMPGDNVKMEVELISPIAIED

SEQ ID NO: 29821 - protein, 288 aa, Yersinia pestis biovar Medievalis str. 91001
MSAKIIDGKTIAQQVRNEVAAVVQQRLAAGKRAPGLAVVLVGENPASQIYVASKRKACEEVGFVSRSYDLPMATSEAELLALIDSLNEDTEIDGILIQLPLPNGIDNVKVLERIHPDKDVDGFHPYNVGRLCQRAPKLRACTPRGIMTLLERYDIPTYGLNAVVVGASNIVGRPMSLELLLAGCTTTVTHRFTKNLRHHIENADLLVVAVGKPGFIPGEWIKPGAIVIDVGINRLESGKVVGDVAFDVAAERAGWITPVPGGVGPMTVATLIQNTLQACEEYHDISQN

SEQ ID NO: 29822 - protein, 270 aa, Staphylococcus capitis
GILVVSAADGPMPQTREHILLSRNVGVPALVVFLNKVDMVDDEELLELVEMEVRDLLSEYDFPGDDVPVIAGSALKALEGDAQYEEKILELMQAVDDYIPTPERDSDKPFMMPVEDVFSITGRGTVATGRVERGQIKVGEEVEIIGIHETSKTTVTGVEMFRKLLDYAEAGDNIGALLRGVAREDVQRGQVLAAPGSITPHTKFKAEVYVLSKDEGGRHTPFFSNYRPQFYFRTTDVTGVVNLPEGTEMVMPGDNVEMTVELIAPIAIED

SEQ ID NO: 29823 - protein, 561 aa, Citrobacter freundii
MASSGTTSEKMRFTGAQLVIHLLERPGDYDRCRHPGSCSILPIYDALSQSTQIRHVLARHEQGAGFIAQGMARTEGKPAVCMACSGPGATNLITAIADARLDSIPLVCITGQVPASMIGTDAFQEVDTYGISIPITKHNYLVRDIAELPQVMSDAFRIAQSGRPGPVWIDIPKDVQTATIELEVLPEPGARTAPPTFDSASVHDAAAMINAAKRPVLYLGGGVINAPEQVRSLAEKANLPTTMTLMALGMLPKAHAVAGMLGMHGARSTNFILQEADLLIVLGARFDDRAIGKTEQFCPNAKIIHVDIDRSELGKIKQPHVAIQGDVADVLAHDAAGRRQSRDEWRQLVADLQREFPSPIPQESDPLTHYGLINAVAACVNDEAIVTTDVGQHQMWVAQAYPLNRPRQWLTSGGLGTMGFGLPAAVGAALANPQRKVICFSGDGSLMMNIQEMATAAENQLDVKIILMNNEALGLVYQQQSLFYQQGVFAATYPGMINFMQIAAGFGLQTCDLNHEADPQAALQAIIDRPGPALIHVRIDAEEKVYPMVPPGAANTEMVGE

SEQ ID NO: 29824 - protein, 271 aa, Staphylococcus cohnii subsp. urealyticus
AILVVSAADGPMPQTREHILLSRNVGVPALVVFLNKVDMVDDEELLELVEMEVRDLLSEYDFPGDDVPVISGSALKALEGDADYEQKILDLMQAVDDFIPTPERDSDKPFMMPVEDVFSITGRGTVATGRVERGQIKVGEEVEIIGMQEDSSKTTVTGVEMFRKLLDYAEAGDNIGALLRGVAREDIQRGQVLAAPGSITPHTNFKAEVYVLSKDEGGRHTPFFSNYRPQFYFRTTDVTGVVTLPEGTEMVMPGDNVEMEVELISPIAIED

SEQ ID NO: 29825 - protein, 526 aa, Zea mays
  misc_feature (474)..(474): Xaa can be any naturally occurring amino acid
MAVAPMDCGAGSISLGHKVLGRFGVPNSSRLRWVGYDRKPRTDQLIARAVSVDRTQLDFSNPDWKKQFQEDFDKRFSLPHLTDVIDVEPRPTTFSLKSRAPLENANGTMQGSWNGYVNDDDRALLKVIKFASPTSAGADCIDPDCSWVEQWVHRAGPRKQIYFEPQYVKAGIVSCGGLCPGLNDVIRQIVLTLEKYGVKNIVGIQHGFRGFFEDHLSEVPLSRHVVQNINLAGGSFLGVSRGGANISDIVDSIQARRLDMLFVLGGNGTHAGANAIHDECRKRKLQVSIVCVPKTIDNDILLMDKTFGFDTAVEAAQRAINSAYIEAHSAFHGIGLVKLMGRSSGFITMHASLSSGQVDICLIPEVPFTLDGPNGVLRHLEHLIETKGFALVCVAEGAGQEYFQKSNATDASGNMVLSDIGVHLQQKIKSHFKDIGVHSDVKYIDPTYMLRAVRANASDAILCTVLGQNAVHGXAFAGFSGITTGVCNTHNVYLPIPEVIKSTRFIDPNSRMWHRCLTSTGQPDFH

SEQ ID NO: 29826 - protein, 139 aa, Glycine max
MASSVMASVALKPAPFTVEKSSVRGLPSLSRNSSSFRVVASGGKKIKTDKPYGINGGMALRDGTDASGRKGKGKGVYQFVDKYGANVDGYSPIYDTKDWSPTGDVYAGGTTGLAIWAVTLLGLLAGGALLVYNTSALVQ

SEQ ID NO: 29827 - protein, 534 aa, Oryza sativa (japonica cultivar-group)
MAQMLDGLRHDEQASLHAPQEASTMPTMSCSDLLLAMMCPLILLLIIFRCYAYATRSGGMLSRVPSPPGRLPVIGHMHLISSLPHKSLRDLATKHGPDLMLLHLGAVPTLVVSSARTAQAILRTHDRVFASRPYNTIADILLYGATDVAFSPYGDYWRQIKKIVTMNLLTIKKVHSYGQTRQQEVRLVMAKIVEEAATHMAIDLTELLSCYSNNMVCHAVSGKFFREEGRNQLFKELIEINSSLLGGFNLEDYFPSLARLPVVRRLLCAKAYHVKRRWDQLLDQLIDDHASKRRSSMLDNNDEESDFIDVLLSIQQEYGLTKDNIKANLVVMFEAGTDTSYIELEYAMAELIQKPQLMAKLQAEVRGVVPKGQEIVTEEQLGRMPYLKAVIKETLRLHPAAPLLVPHVSMVDCNVEGYTIPSGTRVIVNAWAIARDPSYWENAEEFMPERFLSNTMAGYNGNNFNFLPFGTGRRICPGMNFAIAAIEVMLASLVYRFNWKLPIDQAANGGIDMTETFGITIHLKEKLLLVPHLP

SEQ ID NO: 29828 - protein, 270 aa, Staphylococcus epidermidis
GILVVSAADGPMPQTREHILLSRNVGVPALVVFLNKVDMVDDEELLELVEMEVRDLLSEYDFPGDDVPVIAGSALKALEGDAEYEQKILDLMQAVDDYIPTPERDSDKPFMMPVEDVFSITGRGTVATGRVERGQIKVGEEVEIIGMHETSKTTVTGVEMFRKLLDYAEAGDNIGALLRGVAREDVQRGQVLAAPGSITPHTKFKAEVYVLSKDEGGRHTPFFTNYRPQFYFRTTDVTGVVNLPEGTEMVMPGDNVEMTVELIAPIAIED

SEQ ID NO: 29829 - protein, 601 aa, Frankia sp. CcI3
MSGLLHRRLVTRRRTRLRRALRSLTPGTGRVAAPGSRTLLGSACRRLSGPLGLAGAERPKILAEGRPVRPYDPDSLHVYDTTLRDGTQQEGLSLSVGDKLAVARHLDDLGVGFIEGGWPGSNPKDAEFFTRARGELNLTTAVLTAFGATRRAGRAAADDPQVAALRDAGTSVVCLVAKSDLRHVERALRTTPAENLAMIRDTVAHLRAEGKRVFVDAEHFFDGHRVYPDYALEVVSVAAEAGAEVVVLCDTNGGMLPTRIGAVVADVLAATGARLGIHCHDDADCAVANTLVAVEAGVTHVQGTANGYGERCGNANLLSVIAGLETKLDRAVLPPGRLRELVRVSHAIDEVTNSVPDPHRPYVGASAFAHKAGLHASAVKVDPDLYQHIDPAVVGSDMRMLVSELAGRATIELKGRELGLDLSNQREALGRVVDLVKEREAAGYVYEAAEASFELLLRDEVTGRQRFYTLESWRVIVEQRPGGEVASEATVKLTSHGERHVATAEGNGPVNALDTALRNALEKAYPGLADLDLVDYKVRILDGKQGTGAVTRVLLGTSDGRERWDTIGVDENIIAASWAALEDAVDYGLRRQGESPDPVAP

SEQ ID NO: 29830 - protein, 311 aa, Helicobacter hepaticus ATCC 51449
MIDLAIIGGGPAGLSAGLYATRGGIKNVVLFEKGMPGGQITGSSEIENYPGVKDIVSGMEFMEPWQEQCFRFGLTHKMSEVSQITKKNDIFYIHQTDGSIDEAKAVIFCAGGSPKRANLKGEDEFWGRGISTCATCDGFFYKDQEVIVLGGGDTALEEAVYLSRICSKVHLVHRRNEFRAAPSTIEHVKKNDKIHIVTPAVVEEIKGDKSGVTSVLIKHTDSNTNEEIPVMGIFIFVGYNVNTATLKQDDGSMLCECDEYGSIKVDLSMKTSVEGLFAAGDVRTLAPKQVVCAAGDGATAALQAIAYLEHK

SEQ ID NO: 29831 - protein, 490 aa, Burkholderia vietnamiensis G4
MPLTLSRTELVRTANLVDGSWRAALDGRCFDVTNPATLDTIAYAPDSGAADARAATDAAARALPAWRATPARERAAILRAWHAAIVAHTDDLAKLMSLEQGKPLAEARGEVAYGASYVLWFAEEATRTYGDLIPQQQRGKQLSAVKVPIGVVAAITPWNFPLAMIARKIAPALAAGCTVVAKPAEDTPLTALALGFLAMEAGVPPGVLNLIAASRERGIDAVADWLADARVRKITFTGSTAVGKLLARESAATLKKLSLELGGNAPFIVFDDAQLDAAVDGLMAAKFRNGGQTCVSPNRVYVQAGVYDAFAAKLAARVAALKVAPATDPAAQIGPMINARAVDKIARHVGDALERGARVLTGGRRLSQLGPNYYAPTVLADATADMQLSCEETFGPVAALFRFDTEEQAVDAANDTPFGLAAYFYTQDVRRIARVSARLETGIVGINEGALASEAAPFGGVKESGYGREGSKYGLDDYLSIKYLCQGGLD

SEQ ID NO: 29832 - protein, 453 aa, Thiobacillus denitrificans ATCC 25259
MHKLWAFCLALLAGSTHAAALTDVTLDNGMRVIVHEDHRAPVMVSQVWYRAGAVDEFNGTTGVAHVLEHMMFKGTPTVPPGEFSKRIAAAGGRENAFTSRDYTAYFQQMQKDRLALSMELEADRMANLVISDELFGKELQVVMEERRLRTEDQPQAVVYERLMATAYQAHPYRRPIIGWMSDLQSMTAADARDWYARWYAPNNATLVVAGDVDPDEVVALAKRHFGALPARALPERKPQGEPEQVGMKRIVVKAPAQLPYLLMAWHAPTLKDWERDTTPYALQILAGVLSGNDSARLQKSLVKTQQLAVNASAGYDMVARGPGLFMIDATPAPGKSVAALEKAIRAELLRIQTKGISDAELQRVKAQVIAADVYQRDSLFYQAMQLGEYVSTGLPPEALLRRVEKLRAVSAEDVQRAAQEWLREDRLSVAELDPQALKPQPERTAVPGVRHVN

SEQ ID NO: 29833 - protein, 154 aa, Brassica napus
STRRPGILSLTATSCSPSPPPPVAAEVPAPPQEAKSKPRPRRYPKQYPGESVGVAEEMRFVAMRLRNPKRTTIKDKSGTEDADAGAGVSEGEAEEDDGGGVKEEHEEEDEGELEEGEWMPSMEGFVRYLVDSRLVFGTIERVVAESTDVAYLRK

SEQ ID NO: 29834 - protein, 404 aa, Magnetospirillum magnetotacticum MS-1
MLHGKVLVAQGGGPTAVINQSMVGAVLESRKFRNVDLVYGAHHGVRGIVNEDFLDLTQETSHNLEMVAQTPSSGLGSTRDKPDLKYCHEIFEVLKAHGIAYFFYIGGNDSSDTVRIVSEEARKAGYPLRCIHIPKTIDNDLVLNDHTPGFPSAARFVAQAFMGVNLDNAALRGIYLAVVMGRHAGFLTAASALGKKFPEDGPHLIYIPERTFRVDSFLTDVKATYDKYGRCVVALSEGIHDEDGAPIITKLSKATEKDAHGNIQLSGTGALSDLLCEEIKGKLGIKRVRGDTFGYLQRSFIGCVSDVDQREAREVGEKAVQFAMWGDQDGSVTIQRTGFYSVDYKLLPLAAVAGKTRVMEDHFIAESGTDVTDSFRMYLRPLLGSGMPDAFRLRLNSVPRILKK

SEQ ID NO: 29835 - protein, 549 aa, Oryza sativa (japonica cultivar-group)
MVVQLMLFFHDKFMAPMAEEPLPFVLIMIIILLLLVLLHYYLSASTRRSSAASKSNDDVLPPSPPRLPVIGHMHLVGSNPHVSLRDLAEKHAADGFMLLQLGQVRNLVVSSPRAAEAVLRAHDHVFASRPRSAIADILAYGSSNISFSPYGDYWRKARKLVAAHLLSPKKVQSLRRGREEEVGIAVAKLHEAAAAGAAVDMRELLGSFTNDVLCRAVCGKSSFRREGRNKLFMELAAGNADQYAGFNLEDYFPSLAKVDLLRRVVSADTKKLKEKWDSVLGDIVSEHEKKSSLRRDDQVQMDDDRDDDQEEQESDFVDILLDRQQEYNLTRHNIHAILMDMFAAGTDTSYIALEFAMSELIRKPHLMTKLQDEVRKNTTTQMVSEDDLNNMPYLKAVVKETLRLHPPVPLLLPRLSMAQCNANGYTIPANTRVIINVWALGRDAKCWENSEEFMPERFMDSGDTIDNVDFKGTDFQFLPFGAGRRICPGMNFGMASVELMLSNLMYCFDWELPVGMDKDDVDMTDQFALTMARKEKLYLIPRSHVIKIT

SEQ ID NO: 29836 - protein, 959 aa, Oryza sativa
MAATAAALAVTDELALPLRAVGDLAAAAGVSREEVVVITQCASLGGKLPFDDASVGSVLAVIKKVENLGDLFITEISRVLKAGGMVLIQSSPSDQDPNNSIQRKLLLGGFVDVQASAASSQDSEHSVTIKAKKVSWSMGSSFPLKKATKGLPKIQIDDDSELIDEDSLLTEDDLKKPELPVVGDCEVGATRKACKNCTCGRAEAEEKVEKLNLTSEQINNPQSACGNCGLGDAFRCGTCPYRGLPAFKPGEKEIDFGAPVVLGQEIDFASVMTSLPDRGVSSSSSDPLCEGNIAPCSSSSEQKEDCSLKQSKTSILSCVFNSPFNIFEAHQDSSANKSPKSSSGSYDWLRVLRRIVCSGSMWRFLGTSKVLTSSDVWFLGKCYKLSSEESSSDSDSESGHATFLEDFSSRIWITYRRGFDAISDSKYTSDVNWGCMVRSSQMLVAQALIFHHLGRSWRRPSEKPYNPEYIGILHMFGDSEACAFSIHNLLQAGNSYGLAAGSWVGPYAMCRAWQTLVRTNREQHEVVDGNESFPMALYVVSGDEDGERGGAPVVCIDVAAQLCCDFNKGQSTWSPILLLVPLVLGLDKINPRYIPLLKETFTFPQSLGILGGKPGTSTYIAGVQDDRALYLDPHEVQMSATVIIWLFLQYPFYAWNPFCYGSYSGVFSTSQAVDIAADNIEADTSSYHCSTVRDLALDLIDPSLAIGFYCRDKDDFDDFCSRATELVDKANGAPLFTVVQSVQPSKQMYNQDDVLGISGDGNINVEDLDASGTDAGGVGVTYGMRGTNMPPPADVARFLSRDTIFDRVRLLDADPRALRAFAGTGLAVDVTVPNADVPRLAASRASARRWVRASVAPYAEATNVSRVLVGDEVISQANRTLLLSLVPAMRNLHAALAAVLPPSPRRREIIKVSTPHSLWHPGRVHACRRPGVFSTDGYDTAVVKPLLGFLRATGAPFRG

SEQ ID NO: 29837 - protein, 374 aa, Zea mays
MAPTTATKDDSGYGDERRRELQAFDDTKLGVKGLVDSGVKSIPSIFHHPPEALSDIISPAPLPPSPPSGAAIPVVDLSVTRREDLVEQVRHAAGTVGFFWLVNHGVAEELMGGMLRGVRQFNEGPVEAKQALYSRDLARNLRFASNFDLFKAAAADWRDTLFCEVAPNPPPREELPEPLRNVMLEYGAAVTKLARFVFELLSESLGMPSDHLYEMECTQNLNVVCQYYPPCPEPHRTVGVKRHTDPGFFTILLQDGMGGLQVRLGNNGQSGGCWVDIAPRPGALMVNIGDLLQLVTNDRFRSVEHRVPANKSSDTARVSVASFFNTDVRRSERMYGPIPDPSKPPLYRSVRARDFIAKFNTIGLDGRALDHFRL

SEQ ID NO: 29838 - protein, 420 aa, Rhodospirillum rubrum ATCC 11170
MRRVVVTGLGMVTPLGCGVKTNWTSLVQGKSGIRPIQKFDVSDMPARVAGQIPTAADGPHGFDPDTVVSSKDRRRMDDFIVYGLAAAKEAVEDSGWMPEDEESRERTGVMIGSGIGGLTSIAETALILKEHGPRKVSPFFIPSALINLVSGHVSIRYGFKGPNHAVVTACSTGAHAIGDASRLIIHGDADVMVAGGAESAVCRIGIAGFAAARALSTHYNDTPEEASRPYDKGRDGFVMGEGAGIVVLEEYEHAKARGAHIYAEILGYGMSGDAYHITAPAEDGNGGFRAMRAALANAKLTVEDIDYVNAHGTSTPLGDEIELGAVKRLFGDHAYKLTMSSTKSAIGHLLGAAGSVEAIYSILAIRDQVAPPTLNLHDPSDACDIDLAPLVAKERPIRKALSNSFGFGGTNASLIFGGAP

SEQ ID NO: 29839 - protein, 359 aa, Arabidopsis thaliana
MAENYDRASELKAFDEMKIGVKGLVDAGVTKVPRIFHNPHVNVANPKPTSTVVMIPTIDLGGVFESTVVRESVVAKVKDAMEKFGFFQAINHGVPLDVMEKMINGIRRFHDQDPEVRKMFYTRDKTKKLKYHSNADLYESPAASWRDTLSCVMAPDVPKAQDLPEVCGEIMLEYSKEVMKLAELMFEILSEALGLSPNHLKEMDCAKGLWMLCHCFPPCPEPNRTFGGAQHTDRSFLTILLNDNNGGLQVLYDGYWIDVPPNPEALIFNVGDFLQLISNDKFVSMEHRILANGGEEPRISVACFFVHTFTSPSSRVYGPIKELLSELNPPKYRDTTSESSNHYVARKPNGNSSLDHLRI

SEQ ID NO: 29840 - protein, 168 aa, Sorghum bicolor
MAAASSATSVHDFTVKDASGKDVDLSTYKGKVLLIVNVASQCGLTNSNYTELAQLYEKYKDQGFEILAFPCNQFGGQEPGTNEEIVQFACTRFKAEYPIFDKVDVNGNNAAPIYKFLKSSKGGLFGDSIKWNFSKFLVDKEGRVVDRYAPTTSPLSIEKDIKKLLGSS

SEQ ID NO: 29841 - protein, 553 aa, Oryza sativa
MASISPTSSSVAALRGHPVQFVKGGAVSKEAKGSISFSPVANSNNANVKFTGLRVAASLKRDGAFPGDGYSGNDNTVLPKSTSVRGQDYPTADSVLPTESIIVPEISNAGLKCVADMFSDEDKDTEQDLDSPTEGFSSISEAIKDIQQGKLVIVVDDESRENEGDLIMAASLVTPEAMAFVVRYGTGIVCVSMKEEDLERLNLPLMVATKENEEKLCTAFTVTVDAKEGTTTGVSAKDRAKTVMTLASPDSKPEDFNRPGHIFPLKYREGGVLKRAGHTEASVDLAMLAGLPPAAVLCEIVDEDGSMARLPKLRVFAERENLKIVSIADLIRYRRKRDRLVERSSVARLPLRWGNVRAYCYRSVIDGIEHIAMVKGEIGDGQGVLVRVHSECLTGDIFGSARCDCGDQLAMAMEMIEKAGRGVLVYLRGHEGRGIGLGHKLRAYNLQDDGRDTVEANEDLGLPVDSREYGIGAQILRDLGVRSMKLMTNNPAKYGGLKGYGLSIVGRVPLVTPITSENRRYLETKRTKMGHVYGLANGQASHQTGSNGAKGEH

SEQ ID NO: 29842 - protein, 122 aa, Triticum aestivum
  misc_feature (88)..(88): Xaa can be any naturally occurring amino acid
  misc_feature (94)..(94): Xaa can be any naturally occurring amino acid
  misc_feature (96)..(96): Xaa can be any naturally occurring amino acid
  misc_feature (110)..(110): Xaa can be any naturally occurring amino acid
  misc_feature (113)..(113): Xaa can be any naturally occurring amino acid
  misc_feature (115)..(116): Xaa can be any naturally occurring amino acid
MAKKRKRSSDAPAPAAVEKPDDSAPERPERTLFGFKDSAAEPASKDAGPFFRNKEKVLITCSRRIIYRYRHLMQNVVSLLPHAKKDSXVESSRXTXQALNRLVELRSCPXALXRXXKQKVLL

SEQ ID NO: 29843 - protein, 406 aa, Sinorhizobium meliloti
MRRVVVTGLGIVSSIGSDADEVTASLRDARSGITFSPDFAEHGFKCQVWGAPTLDPSDLVDRRAMRFLSQGGAWNHVAMKQAIADSGLEAGDITNERTGIIMGSGGPSTRAIVEAAEITRKNNSPKRIGPFVVPKAMSSTASATLATWFQIHGVNYSISSACSTSAHCIGNAAEMIQWGKQDVMFAGGHEDLDWTMSNLFDAMGAMSSKYNDTPSVASRAYDANRDGFVIAGGAGVLVLEELEHAKARGAKIYAEIVGYGATSDGYDMVAPSGEGAVRCMRQALATVKGEVDYINTHGTSTPVGDQKEIGAIREVFGEKMPHVQSTKSLTGHSLGAAGVQESIYGLLMMQAGFIGESAHITELDPEFEGVPIVRKRIDNAKIDTVLSNSFGFGGTNATLVFQRYNG

SEQ ID NO: 29844 - protein, 336 aa, Bordetella bronchiseptica RB50
MTIRVAINGYGRIGRNILRAHYENGKKHDIEIVAINDLGDPKTNAHLTRFDTAHGKFPGTVTVDGDYMVVNGDKIRVLANRNPAELPWGELGVDVVLECTGFFTSKEKAGAHLKGGAKKVIISAPGGKDVDATIVFGVNQNVLKAEHTVISNASCTTNCLAPLVKPLHDKLGVETGLMTTVHAYTNDQVLTDVYHEDLRRARSATMSMIPTKTGAAAAVGLVLPELNGKLDGFAIRVPTINVSLVDLSFVAKRDTTVEEVNSILQAAAEGELKDILTYNTEPLVSVDFNHNPASSNFDATLTKVSGKLVKVSSWYDNEWGFSNRMLDTTVALMSAK

SEQ ID NO: 29845 - protein, 182 aa, Arabidopsis thaliana
  misc_feature (35)..(35): Xaa can be any naturally occurring amino acid
MASSMLSSAAVVTSPAQATMVAPFTGLKSSASFPXVTRKANNDITSITSNGGRVSCMKVWPPIGKKKFETLSYLPDLTDVELAKEVDYLLRNKWIPCVEFELEHGFVYREHGNTPGYYDGRYWTMWKLPLFGCTDSAQVLKEVEECKKEYPGAFIRIIGFDNTRQVQCISFIAYKPPSFTDA

SEQ ID NO: 29846 - protein, 250 aa, Arabidopsis thaliana
  misc_feature (226)..(226): Xaa can be any naturally occurring amino acid
  misc_feature (234)..(234): Xaa can be any naturally occurring amino acid
  misc_feature (242)..(243): Xaa can be any naturally occurring amino acid
SPPPPWNVLDKIKEFSDKIRSGSWVGATGKPLKDVIAIGIGGSFLGPLFVHTALQTDPEALESAKGRQLRFLANIDPVDVARNISGLNPETTLVVVVSKTFTTAETMLNARTLREWITAALGASAVAKHMVAVSTNLALVEKFGIDPNNAFAFWDWVGGRYSVCSAVGVLPLSLQYGFSMVEKFLKGASSIDQHFQSTPFEKNIPVLLGLLSVWNGSMESNGKGVXIDGLPLPXETGEIDFXXPWTNGQH

SEQ ID NO: 29847 - protein, 810 aa, Fusobacterium nucleatum subsp. nucleatum ATCC 25586
MKKVLIVGGVAGGASTATRLRRLDENLEIVIFEKGEYVSFANCGLPYYIGDIIQNRESLLVQTPESLKARFNLDVRVNSEVVGVNGKDKKVKVKTKNGEEYEEIFDFLVLAPGAKPIFPAIKGIENKKIFTLRNINDMDKIKAEIKNHNVKKATVIGGGYVGIETAENLKYLGIDTTLIEAAPHILAPFDSEISNILEYELVNNGINLMISEKVVEFQEDGNEIIIKLESGKIVTTDMLILSIGVSPDTKFLQNSGINLGERGHILVNEKLETNIDGIYALGDSIIVKNYITNQDVAIPLAGPANRQGRIVAGNIVGRNEKYKGSLGTAIIKIFELTGASTGLNERSLKQLNIPYEKVYLHPNNHAAYYPGATAISIKALYNKENGQILGAQAVGISGVDKFIDVIATSIKFKATIDDLTELELAYAPPFLSAKSPANMLGFIGQNIEDNLLGQVFMEDLENYNEKETIILDVREKLELISGKLNNSINIPLSELRKRYTELPKDKEIWTYCAVGLRGYIASRFLTQKGYKVKNLAGGIKIEEKELIKMQEETFSNKENSDYNVDKEDEYLDLSGLSCPGPLVKIKEKIDKLQESKKLKVKVSDPGFYNDIQAWSKVTKNSLLSLDKKDGLTYATLQKGQASKVVVKEQENVIIEDNSNMTMVVFSGDLDKAIAAFIIANGALTMGKKVTMFFTFWGLSILKKKKLAKKSFIEKMFAMMLPKNSQDLPVSKMNFFGIGAKMIRSVMKKKNIMSLEELMKKAKDSGVNITACTMSMDVMGISKEELIDGINYGGVGQYLGETEKSNNNLFI

SEQ ID NO: 29848 - protein, 360 aa, Pseudomonas fluorescens PfO-1
MSKQILILPGDGIGPEIMAEAVKVLELANEKYSLGFELSHDVIGGAAIDKHGVPLADETLDRARAADAVLLGAVGGPKWDTIERDIRPERGLLKIRAQLGLFGNLRPAILYPQLADASSLKPEIAAGLDILIVRELTGGIYFGAPRGTRTLENGERQSYDTLPYSESEIRRIARVGFDMARVRGKKLCSVDKANVLASSQLWREVVEQVAKDYPDVELSHMYVDNAAMQLVRAPKQFDVIVTDNMFGDILSDEASMLTGSIGMLPSASLDANNKGMYEPCHGSAPDIAGKGIANPLATILSVSMMLRYSFNLHEAADAIEKAVSVVLDQGLRTGDIFSTGCTKVGTQEMGDAVVAALRNL

SEQ ID NO: 29849 - protein, 452 aa, Prochlorococcus marinus subsp. marinus str. CCMP1375
MSIENLVIIGSGPAGYTAAIYAARANLQPLLITGFERGGIPGGQLMTTTFVENFPGFPDGIMGPDLMDLLKAQAIRWGTKLLELDAEAIDLKQNPFRVKTANQSIAAQALIIATGARANKLGIPNENKFWTRGISACAICDGATPQFRNEELAVVGGGDSACEEAVYLTKYGSHVHLLIRSNQLKASKAMSDRVMANSQITVHWETELIDVEGKEWIETLKVKRRGTKQEETIKAKGLFYAIGHTPNADLLEGQLLINQNGYISTKSGRPETSIEGVFAAGDVADAEWRQGITAAGSGCKAALAAERWLSRNNLSTLIKRDSIEPAKTDKETEIAISTEQNFDATKTWQKGSYALRKLYHESSKPILVVYTSPNCGPCHVLKPQLKRVIQELKGTVQGIEIDIDIEQEIAKQAGVNGTPTVQLFHQKELKTQWRGVKQRSEFKEAITKVLSK

SEQ ID NO: 29850 - protein, 374 aa, Aspergillus nidulans FGSC A4
MAFFFNRGRSRQPSDVVRSIKDLLLRLREPSTASKVEDELAKQLSQMKLMVQGTQELEASTDQVHALVQAMLHEDLLYELAVALHNLPFEARKDTQTIFSHILRFKPPHGNSPDPPVISYIVHNRPEIIIELCRGYEHSQSAMPCGTILREALKFDVIAAIILYDQSKEGEPAIRLTEVQPNVPQRGTGVFWRFFHWIDRGTFELSADAFTTFRARYLATNFDYFFAQFNTFLVQSESYVTKRQSIKLLGEILLDRANYSVMMRYVESGENLKLCMKLLRDDRKMVQYEGFHVFKVFVANPDKSVAVQRILINNRDRLLRFLPKFLEDRTDDDQFTDEKSFLVRQIELLPKEPIEPSRSAREPSRSTANTTTVA

SEQ ID NO: 29851 - protein, 531 aa, Francisella tularensis subsp. holarctica
MSIEIVKVPDIGDYDNVDVIEVNVAVGDVIAEEDSLITLETDKASMEVPSPFAGKITKLTVKVGDKVSQGTAIMEVEVESAADQAATTQSQPQTTSSAPVAATTNQIVDVEVPDIGDYDSVDVIEVSVKVGDEIAEEDSLITLETDKASMEVPSPVAGKVVEVITKVGDKVSQGSLILKVKTQGSAPVEQTSSQPAPAKQEQAKQQAATPAAPTPASSSVNEYAVDNSNAHASPAVRKLARILNIDLSKVKATGRKGRVTKEDCYNYIKHAVTQVQTGKVAASGSGLDLLDDPVVDFAKFGEIETQPLSRINKISAKNLHRNWVKIPHVTFYDDADVTDLEEFRNAKKAFAEKKGIKITPLSFLVKAAAVALQEFPRFNSSLSNDGENLIIKKYYNIGFAADTPAGLMVPVVKDADKKGIIEISKDIMELAGKARDGKLGAKDMTGATFTISSLGVLGTTSFTPIINMPEVAIMGVSKTAVKPIWNGKEFIPRTMLPLSLSTDHRVIDGALAAKFLTRYCQILSDLREIIM

SEQ ID NO: 29852 - protein, 111 aa, Taraxacum officinale
KKRGHAHGNRSWIKIEENGNSKVVELDKASVMRQCCLPARDLRLLDPLFIYPSTILGREKAIVVSLEQIRCIITADEVFLMNSLDASVVQYKSELCKRLQEEKCHSDDLPF

SEQ ID NO: 29853 - protein, 536 aa, Roseovarius nubinhibens ISM
MTRERIYLYDTTLRDGQQTQGVQFSTLEKQAIARTLDKLGVDYIEGGWPGANPTDSAFFEDAPETRAIMTAFGMTKRAGRSAENDEVLAGVLNAGTRAVCLVGKTHDFHVETALGISLDENVENIERSIAHLVAQGREALFDAEHFFDGYKANAPYALDCLNAAYRAGARWIVLCDTNGGTQPGEIHDITRAVIAAGIPGARLGIHTHNDTEQAVAGSLAAIEAGARQIQGTLNGLGERCGNANLTSIIPTLMLKEVYASRFETGVTAEALEGLTHASQMLDDILNRVPRRQAAYVGASAFAHKAGLHASAILKDPSTYEHIDPAAVGNARIVPMSNQAGQSNLRRRLAEAGLKVEAGDPALARILEEVKTREDRGYTYDSAQASFELLARAELGQMPAFFEVKRYKVTVERRKNKYDQMVSLSEAVVVVKIDGEKTLSVSESMDEHGSDRGPVNALAKALAKDLGRYQSAIDDMRLVDFKVRITQGGTEAVTRVIIDSADGQGRRWSTVGVSPNIVDASFEALLDAINWKLLRDG

SEQ ID NO: 29854 - protein, 347 aa, Wolbachia endosymbiont of Eurema hecabe (Okinawa 2)
VVANTDAQALEKSLCDKKIQLGINLTKGLGAGALPDVGKGAAEESIDEIMEHIKDSHMLFITAGMGGGTGTGAAPVIAKAAREARAVVKDKGAKEKKILTVGVVTKPFGFEGVRRMRIAELGLEELQKYVDTLIVIPNQNLFRIANEKTTFADAFQLADNVLHIGIRGVTDLMIMPGLINLDFADIETVMSEMGKAMIGTGEAEGEDRAISAAEAAISNPLLDNVSMKGAQGILINITGGGDMTLFEVDSAANRVREEVDENANIIFGATFDQAMEGRVRVSVLAAGIDSCNDNSSVNQNKIPAEEKIFKWPYNQIPISETKEYASTEQTNERVKWGSNVYDIPAYL

SEQ ID NO: 29855 - protein, 515 aa, Solanum tuberosum
MGICASKGKPNNANNGHHGSGSGGVPTHRNEIQYTKSPGPEAQLHVRPPPSPKPAVRYDTILGKPYEDVKLHYTLGKELGRGQFGVTYLCTEIVTGQQYACKSISKKKLVTKADKDDMRREIKIMQHLSGQPNIVEFKGAYEDKGSVYLVMELCGGGELFDRIIAKGHYSERAAATMCRAIVNVVHVCNFMGVLHRDLKPENFLLSDKSENAALKITDFGLSVFIQEGKSYKDIVGSAYYVAPEVLRRCYGKEIDIWSAGVMLYILLSGVPPFWAETEKGIFDAILKGTIDFESKPWPSVSSSAKDLVQKMLTKDPKKRITAAQVLEHPWLKEGGVASDKPLEGAVLSRMKQFRAMNKLKKLALKVIAENLSAEEIHGLKAMFHNIDTDNSGTITYEELKSGLAKLGSKLTEAEVKQLMEAADVDGNGSIDYTEFITATMHKHRLERDENLYTAFQYFDKDGSGFITRDELEAAMQEHGIGDPSCIREIISEVDTDNDGRINYEEFCTMMRSGAK

SEQ ID NO: 29856 - protein, 1275 aa, Cryptococcus neoformans var. neoformans JEC21
MGKHGKTKTTSKGAQRPAPYQKKAKVDVTFDTGVKPSKAENKPKATNGKAKKDKETSKPSKAKQPKEKKEETAKVSSPKPTKSDKGKGKSILPPTVGPSTFIVIAGSYEKLLYGLEGSYPTGSTAPVLEPIFIFPAHLACVKAVAASPGGKWLATGSEDEFVKVWDLRRRKEVGSLSQHTGSITSLHFPTPSHLLTTSVDSTLSLFRTSDWSLLKSLKGHSGRVNHVDVHPTGRVALSVGKDQTLKMWDLMRGRGAASLPLGSEAELVKFSQQGTHFAVLFPRKIQIYSLTLKLLYTLETKSRFNHLLFHLLPASTEDGEETEVLCIGTEKGVVEIYRITLGEGEESEDEEDDDEEIEKETKGKGAELERIATLVGHTNRVKAISSLPFLAPTSTGDVRKTILLTTVSSDGLINVYDLCAATTDIEKGEENKVEPVASYDTKGTRLTCVYLADGQDGTKEIKVKEEEISESEDEVEDIYGSEQASDDDEDDDGMEVEFEDEEEEIEGEEDMSEVTETPVPPLSNVTEPPRSPNPLNPATDAQGENIQPLAEREPQNDVPGVTAAPDQPPLPVDAPLPPSPAASDEPPPSLPSSAIPTAVPTPTVITVGEDKPEVPAGAPLSTVTQGSASMDLDEATPQPVKRAGEELDGEREEKRLKEDGPAVEAAAEAGEATGEAIAVAVQSDVPLVGPDGQPLPPPAWLSYVPPAPKFAGPNTPLTLTQHKYMLNAVRSLKKRLPDAYNFLVPVDTVRFNIPHYHTVIDTPMDLGTVETKLIVSDPRGPPKDKSKMSKWDTSKGKYNNVAEVTEDVRRIWENSRKFNGKEHPVSQMATRLEEAFERSLSNLPAEPVIASPASAGPSHVRRSSISQPPVVRRSSDDTRPKREIHPPPPKDLAYEESPGSARKPKRRNDPQLQWASRAIKSLEISNKYYVAVSPFLYPVDKIIEEVPDYATVIKRPIDFNIIKNKLAENTYEDVNQVDDDIRLMVANAQKFNPPGHEVHTSATQLLQIWEEKWRTVPAKVETRDSSEDPMAEAFDDYSSDEDNAQLRSLESQVIALNQQISALRSKMTKRRAARGSKSKSKPKTAPRKSSVSKPSPNINGNSQPKKSKKAPKEANLMYREDDDESEEEEDISHLSHAQKQELAEKIGQTDGETLSKVISIIQQSTNIGGSNQEIELDIDSLPPATVIRLYNLVCRGGRGSGSKRGRGGVVKKAGGTGRKAMGGVSRRSVNEREEAERIRRMEQQLQAFESSRPVPQAVGYEEEESSSEEESSEEE

SEQ ID NO: 29857 - protein, 347 aa, Wolbachia endosymbiont of Eurema hecabe (Okinawa 4)
VVANTDAQALEKSLCDKKIQLGINLTKGLGAGALPDVGKGAAEESIDEIMEHIKDSHMLFITAGMGGGTGTGAAPVIAKAAREARAAVKDKGAKEKKILTVGVVTKPFGFEGVRRMRIAELGLEELQKHVDTLIVIPNQNLFRIANEKTTFADAFQLADNVLHIGIRGVTDLMIMPGLINLDFADIETVMSEMGKAMIGTGEAEGEDRAISAAEAAISNPLLDNVSMKGAQGILINITGGGDMTLFEVDAAANRVREEVDENANIIFGATFDQAMEGRVRVSVLAAGIDSCNDNSSVNQNKIPAEEKNFKWPYNQVPISETKEYASTEQTNERVKWGSNVYDIPAYL

SEQ ID NO: 29858 - protein, 270 aa, Staphylococcus haemolyticus
GILVVSAADGPMPQTREHILLSRNVGVPALVVFLNKVDMVDDEELLELVEMEVRDLLSEYDFPGDDVPVIAGSALKALEGDAQYEEKILELMQAVDDYIPTPERDSDKPFMMPVEDVFSITGRGTVATGRVERGQIKVGEEVEIIGIHDTSKTTVTGVEMFRKLLDYAEAGDNIGALLRGVAREDVQRGQVLAAPGSITPHTKFKADVYVLSKDEGGRHTPFFTNYRPQFYFRTTDVTGVVNLPEGTEMVMPGDNVEMTVELIAPIAIED

SEQ ID NO: 29859 - protein, 856 aa, Brassica oleracea
MKGVRNIYHHSYTSLLLVYVVMILFHPGLAIYITTLSATESLTISSNRTLVSPGNVFELGFFKTTSSSRWYLGIWYKKLPDRTYVWIANRDNPLPNTIGTLKISGNNLVILGHSNKSVWSTNVTRGNERSPVVAELLANGNFVMRDSNNTDANEFLWQSFDFPTNTLLPEMKLGYDLKTGLNRFLTSWRGSDDPSSGDHLYKLEPRSFPEFYIFNDDFPVHRIGPWNGIEFSGIPEDQKSSYMVYNFTENSEEVAYSFRMTNNSIYSRLIISSEGYLQRLIWTPSTKIWQEFWSSPVSLQCDPYRICGPYAYCDENTSPVCNCIQGFDPKNQQQWDLRSHASGCIRRTWLSCRGDGFTRMKNMKLPDTTAAIVDRSVGVKECEKKCLSNCNCTAFANADIRNGGTGCVIWTGELEDIRNYVADGQDLYVRLAAADLVKKRNSNGKIIGLIVGVSVLLLLIISCLWKRRQKRAKASATSIANRQRNQNMPMNGMVLSSKRQLSGENKIEDLELPLIELEAVVKATENFSSCNKIGEGGFGIVYKGRLLDGQEIAVKRLSKTSFQGTDEFMNEVTLIARLQHINLVQVLGCCIEGDEKMLIYEYLENLSLDSYLFGKTRSSKLSWKERFDITNGVARGLLYLHQDSRFRIIHRDLKVSNILLDKNMIPKISDFGMARIFARDETEANTMKVVGTYGYMSPEYAMNGIFSEKSDVFSFGVIVLEIVTGKRNRGFYNLNYKNNFLSYAWSNWKEGRALEIVDPVIVDSLSPLSSTFQPQEVLKCIQIGLLCVQELAEHRPTMSTVVWMLGSEATEIPQPKPPGYCVGSSPYELDPSASRQLDDDESWTVNQYTCSVIDAR

SEQ ID NO: 29860 - protein, 368 aa, Burkholderia xenovorans LB400
MKTYRIATIPGDGIGKEVVPAGRRVLEAIAARSDAFGFEFENFDWGGDYYREHGVMMPADGLDAIRHQDAILFGSAGDPHIPDHVTLWGLRLKICQGFDQYANVRPTRILPGIDAPLKRCGPQDLDWVIVRENSEGEYAGVGGRVHQGHPIEVATDVSMMTRAGVERILRFAFRLAQSRPRKLLTVITKSNAQRHAMVMWDEIAVQVSKEFPDVRWDKELVDAATARMVNRPATLDTIVATNLHADILSDLAAALAGSLGIAPTANLDPERRYPSMFEPIHGSAFDIMGKGLANPVGTFWSVVMMLDHLGEHAAARQLMAAIERVTADPSLHTGDLGGTATTAQVTDAVCAILAAGSPAVPAASVKAA

SEQ ID NO: 29861 - protein, 342 aa, Frankia sp. CcI3
MRLAVIGGDGIGPEVVAEGLRVLRAVHPKVDTTEYDLGARRWHETGETLPDSVLEELRGHDAILLGAVGDPGVPSGVLERGLLLRLRFEFDHHVNLRPVRLYPGVRSPLAGDPAIDMIVVREGTEGPYAGAGGVLRKGTPHEVATEESLNTRYGVERVVRDAFRRADRRERRHLTLVHKNNVLTKAGDLWSRTVAEVAPEFPDVRVDYQHVDAASMFFVTDPGRFDVVVTDNMFGDILTDIGAAITGGIGLAASGNLDPSGVHPSMFEPVHGSAPDIAGRQLADPTATVASVAMLLDHLGHAEEAAKVEAAVASSLADRAAAGAAQPSTRERGEDLAARAAG

SEQ ID NO: 29862 - protein, 477 aa, Escherichia coli
MTSLLEQAEQVLEKAQSGINPRWYPRYHLAPRAGWMNDPNGLVWFDGWYHAFYQHHPYSPKWGPMHWGHARSKDLVHWEHLPVALAPEGPADKDGCFSGSAVVDGDTLALIYTGHKFHGPSDTDDNLYQVQCLATSRDGIHFERHGKVIDTPPGLHHFRDPKVWREGEFWYMVVGSRVENTGQVRLYRSTDLREWHDEGIFAEADEGKGFMWECPDFFPLGEKRVLMFSPQGMAAEGYHYRNLFQSGYLLGDWQPGQPFTHSGQFTELDHGHDFYAPQSFLTPDGRRIVIGWLDMWESSMPEQQDGWAGMLSLPRELSLVDGRVRMKPAAEVTALRGSYYPTPVRCLNNQNVLVAANADAVEVQLAWDLSASTAEQFGIALGDGLRIYVDDQAGRLVVERRYPEYSLEGTRSIPLPADSVLSLRIFIDRSSVEVFVNDGDACLSSRIYPQPGERDISLFANLGKASLYDAGYWSLDK

SEQ ID NO: 29863 - protein, 270 aa, Staphylococcus hominis
AILVVSAADGPMPQTREHILLSRNVGVPALVVFLNKVDMVDDEELLELVEMEVRDLLSEYDFPGDDVPVIAGSALKALEGDAQYEEKILELMQAVDDYIPTPERDSDKPFMMPVEDVFSITGRGTVATGRVERGQIKVGEEVEIIGIKETSKTTVTGVEMFRKLLDYAEAGDNIGALLRGVAREDVQRGQVLAAPGSITPHTKFKADVYVLSKDEGGRHTPFFSNYRPQFYFRTTDVTGVVNLPEGTEMVMPGDNVEMTVELIAPIAIED

SEQ ID NO: 29864 - protein, 859 aa, Brassica oleracea
MKGVRNIYYHSYTCFFLVFVVLILFHPAHSIYLNILSSTETFTISGNRTLVSPGDVFELGFFKTTSSSRWYLGIWYKKVYFRTYVWIANRDNPLSSSIGTLKISNMNLVLLDHSNKSVWSTNLTRGNERSPVVAELLANGNFVMRFSNNNDENEFLWQSFDFPTDTLLPEMKLGYNLKTGLNRILTAWRNLDDPSSGDYYYKLEKRELPEFYVLRNGFEIHRSGPWNGVRFSGIPENLKLSYMVYNFTENSEEVAYTFRMTNSSIYSRLKVSSDGYLQRLTLIPKSILWNLFWSSPVDIRCDVYKVCGRYSYCDGNTSPLCNCIQGFDPWNMEQWNMGEAASGCIRRTPLRCSDDGFTRMRRMKLPETTNAIVDRSIGVKECEKRCLSDCNCTAFANADIRNGGTGCVIWTGELEDIRTYYDDGQDLYVRLAAADLVKKRNANWKIISLIVGVTVVLLLLLLIMFCLWKRKQNRAKAMATSIVNQQRNQNVLMMNGMTQSNKRQLSRENKADEFELPLIELEAVVKATENFSNCNELGQGGFGIVYKGMLDGQEVAVKRLSKTSLQGIDEFMNEVRLIARLQHINLVRILGCCIEADEKILIYEYLENSSLDYFLFGKKRSSNLNWKDRFAITNGVARGLLYLHQDSRFRIIHRDLKPGNILLDKYMIPKISDFGMARIFARDETQAMTDNAVGTYGYMSPEYAMDGVISEKTDVFSFGVIVLEIVSGKRNRGFYQVNPENNLLSYAWSHWAEGRALEIVDPVIVDSLSSLPSTFQPKEVLKCIQIGLLCIQERAEHRPTMSSVVWMLGSEATEIPQPKPPVYCLIASYYANNPSSSRQFDDDESWTVNKYTCSVIDAR

SEQ ID NO: 29865 - protein, 458 aa, Chlorokybus atmophyticus
MAAATLSSSISSCSGLRAQAKAATPTKARRVAAAPSRHVLGGFSGLKAVRNNVLLVQKRPTDEDRLFAQAAAPQASSSAGKQETTMKLRVAINGFGRIGRNFLRCWHGRGDDSPLEVIAINDSGGVKQATHLLKYDSMLGTFNANVGIIDEKTISVDGKPITIVSNRDPAQLPWAELGIDLVIEGTGVFVDGPGAGKHLQAGAKKVLITAPAKGAEIPTYVVGVNEDQYDHDASAIISNASCTTNCLAPFVKVLDEEFGIVKGTMTTTHSYTGDQRLLDASHRDLRRARAAALNIVPTTTGAAKAVALVLPQLKGKLNGIALRVPTPNVSVVDLVINTEKKGITADQVNAAFRKAAEGPLNGVLAVSDLPLVSIDFRCSDVSSTIDSSLTMVMGDDMLKVVAWYDNEWGYSQRVVDLAHIVANNWPGQKADSEEESGDPLDKYCATNPEADECRVYDE

SEQ ID NO: 29866 - protein, 327 aa, Helicobacter hepaticus ATCC 51449
MAIKLAINGTGRIGLCAARIIGQRDDVELVAMNTTADIDTLVHLLRYDSVHRSYDIEKIDKQTLCIGKSKNVKIVSDRDPRNLDFGAAVGVLECTGKFNSLEKSSLHLKDNIKKVIISAPADDAPTFVYGVNHTNYQGQSVISNASCTTNCLAPIVKVLDSHFGIENGLMSTIHSYTNDQNLLDVKHKDLRRARAAALNMIPTSTGAAKAIGLVLPHLAGKLNGISVRVPTPDVSLVDLSVNLKSKVSKESINEAFYKAQEGAMKGLIIVDDEQRVSSDFIGSSASAIIVSDKSIAIDKSAKILAWYDNEMGYTHRLVDMSVYVCRT

SEQ ID NO: 29867 - protein, 270 aa, Staphylococcus lugdunensis
GILVVSAADGPMPQTREHILLSRNVGVPALVVFLNKVDMVDDEELLELVEMEVRDLLTEYDFPGDDVPVIAGSALKALEGDEKYEAKILELMDAVDNYIPTPERDSDKPFMMPVEDVFSITGRGTVATGRVERGQIKVGEEVEIIGIHDTTKTTVTGVEMFRKLLDYAEAGDNIGALLRGVAREDVQRGQVLAAPGSITPHTKFKADVYVLSKDEGGRHTPFFSNYRPQFYFRTTDVTGVVNLPEGTEMVMPGDNVEMTVELIAPIAIED

SEQ ID NO: 29868 - protein, 318 aa, Synechocystis sp. PCC 6803
MKPTVIITGASSGVGLYGRKALIDKGWHVIMACRNLDKTQKVADELGFPKDSYTIIKLDLGYLDSVRRFVAQFRELGRPLKALVCNAAVYFPLLDEPLWSADDYELSVATNHLGHFLLCNLLLEDLKACPDADKRLIILGTVTANSKELGGKIPIPAPPDLGNFEGFEAGFKKPIAMINNKKFKSGKAYKDSKLCNMLTTRELHRRFHQETGIVFNSLYPGCVADTPLFRNHYSLFRTIFPWFQKNVTKGYVSQELAGERVAMVVADDKFKDSGVHWSWGNRQQAGREAFVQELSEQGSDAQKAQRMWDLSEKLVGLV

SEQ ID NO: 29869 - protein, 376 aa, Burkholderia xenovorans LB400
MASRQEIKRYKANLSDELHSAALYETLADAEKDDTRKQVYGDLARSERDHAQVWADKLRANGLEPKGAGHAVKTRLMKALVRLFGASFVLPTLAAAEYADRNKYEGQPDAGRMSADEQHHAAIVRTLAHGGGDTDLSQGARIAAAEQWHKGVGAGNDLRAAVLGANDGLVSNFCLIMGVAGAGTGNKAILLTGLAGLIAGACSMALGEWLSVTNARELARTQIAKEAQEIKETPEAEEHELTLIYRAKGLDANEAKRVASQMMRDPDKALDTLTREELGLDPAELGGNPWSAAGVSFCLFSLGAIFPVMPFLWTRDYNAIVQCVVLSMLALASIGVFTSLFNGRSAGFSALRQIVIGLIAAAFTFGVGRLFGVSVS

SEQ ID NO: 29870 - protein, 577 aa, Frankia sp. CcI3
MTTQQPSGMPVEKYRPFVPVSLPDRAWPERTITRAPQWCSVDLRDGNQALIDPMTPARKMQMFELLVAMGYKEIEVGFPAASQTDFDFIRQLIESDRIPDDVVIQVLTQAREDLIERTAASLVGADRALIHLYNSTSTLQRRVVFGLDRAGVTEIAVQGARWCAQYAEKLLDGTDVRWQYSPESFTGTELDYAVEVCEAVMDVWAPTPQRPVVLNLPATVEMSTPNVYADQIEWVGRNLTRRDAVVLSLHPHNDRGCAVAAAELGVLAGADRVEGCLFGNGERTGNVCLVTLGMNLFSQGIDPMIDFSDIDGIRRAVEYCNQLPVHPRHPYGGDLVYTAFSGSHQDAIKKGFEAMERTGQTRWEVPYLPIDPKDVGRSYEAVIRVNSQSGKGGVAYLLKSEHSLDLPRRLQIEFSGVVQRHTDSAGGEVTAEELWTIFRSEYFLDGAEGSGPLELLGSRTTAASGDRDEVSVSVRFQGADTVITGTGNGPIDAFVTALASRDLTVRILDYNEHALGSGADARAAAYLEVAVDDRIFWGVGIDANIVTASLRAVVSAVNRAARDRSVPARAGRGGGAG

SEQ ID NO: 29871 - protein, 336 aa, Wolbachia endosymbiont of Dirofilaria immitis
  misc_feature (90)..(90): Xaa can be any naturally occurring amino acid
QALEKSLCDKKIQLGIDLTKGLGAGALPDIGKGAAEESIKEIMEHIKDSHMLFITAGMGGGTGTGAAPVIAKAAREARTAVKDKMLREKXILTVGVVTKPFGFEGVRRMRIAELGLEELQKYVDTLIVIPNQNLFRIANEKTTFADAFKLADNVLHIGIRGVTDLMIMPGLINLDFADIGTVMSEMGKAMIGTGEAGGENRAINAAEAAMSNPLLDNVSMKGAQGILINITGSGDMTLFEVDAAANRVREEVDENANIIFGATFDQAMEGKVRVSILATGIDSSAIRDDRVETSSVSQTRALKEEKFKWPYSQTSVPETKTTEQVSEKVRWNNNIY

SEQ ID NO: 29872 - protein, 271 aa, Staphylococcus simulans
GILVVSAADGPMPQTREHILLSRNVGVPALVVFLNKADMVDDEELLELVEMEVRDLLSEYDFPGDDVPVIVGSALKALEGDPEYEQKILDLMQAVDDYIPTPERDSDKPFMMPVEDVFSITGRGTVATGRVERGQIKVGEEVEIIGITEESKKTTVTGVEMFRKLLDYAEAGDNIGALLRGVAREDVQRGQVLAAPGSITPHTKFKADVYVLSKEEGGRHTPFFTNYRPQFYFRTTDVTGVVHLPEGTEMVMPGDNVEMTVELIAPIAIED

SEQ ID NO: 29873 - protein, 309 aa, Bacillus cereus G9241
MRKIIVGSRKSKLALTQTNWFIDQLKALGLPYEFEVKEIVTKGDVILDVTLSKVGGKGLFVKEIEHALLTKEIDMAVHSMKDMPAVLPEGLMIGCTPKRVDPRDAFISKSGASFKELAEGAILGTSSLRRSAQLLAARPDLQVKWIRGNIDTRLRKLKEEDYDAIILATAGLQRMGWDNEVITEHLDETLCVPAVGQGALAIECREDDKDLLQLLAHMNDGITEKTVAAERVFLHKLEGGCQVPIAGYATLTENDAIELTALVGSMDGSVLLKETVVGTDPEKVGLEAADRLINQGAKELILAANKGQQ

SEQ ID NO: 29874 - protein, 513 aa, Ralstonia metallidurans CH34
MSGSPSPESEADAARLPYRIDRNFTRGLVWLRRDLRTDDNAALHYALKHCRQVWCVFVFDREILAPLLARGLHADRRVEFILRSLEPLRRALEDSGGGLIVLDGTARQAIPRLAAELEVEAVFANHDYEPAANDRDEAVRRTLAADSRVLLTFKDQVIFERDEILTGQGRPFSVFTPYKNAWLRTVRPFDLRPYPIEKHQETLAPVPQRYRGQLPTLADLGFTATNLAGIAMPTGSDGAHALFDEFLSRIGDYGRRRDFPAVRGPSYLSVHLRFGTISIRTLARAAHDTMLRGGAASEGATVWLSELIWRDFYFMILHHHPRVAEGKSFHAEYDGLRWIAPATGDRYFAAWCDARTGYPLIDAAMLQIRQSGYMHNRLRMVTASFLVKDLGVDWRRGEQYFADQLNDFDLAANNGGWQWAASTGCDAQPYFRIFNPVTQSEKFDPQGQFIRRYLPMLAALPDRYIHAPWTAPNEVLRAAGVTLGKDYPRPIVQHDVARKETLERYGVVKSAKA

SEQ ID NO: 29875 - protein, 967 aa, Glycine max
MANRNLEKMASIDAQLRQLAPAKVSEDDKLIEYDALLLDRFLDILQDLHGEDLKETVQEVYELSAEYEGKHDPKKLEELGNLITSLDAGDSILVAKSFSHMLNLANLAEEVQISRRRRNKLKKGDFADENNATTESDIEETLKKLVFGLKKSPQEVFDALKNQTVDLVLTAHPTQSIRRSLLQKHGRIRNCLSQLYAKDITPDDKQELDEALQREIQAAFRTDEIRRTPPTPQDEMRAGMSYFHETIWNGVPRFLRRVDTALNNIGIKERVPYNAPLIQFSSWMGGDRDGNPRVTPEVTRDVCLLARMMAANLYYSQIEDLMFELSMWRCNDELRVRAEELHRSSKKDEVAKHYIEFWKKVPPNEPYRVVLGEVRDRLYQTRERSRHLLSNGYSDIPEEATFTNVEEFLESLELCYRSLCACGDRAIADGSLLDFMRQVSTFGLSLVRLDIRQESDRHTDVLDAITKHLEIGSYQEWSEEKRQEWLLSELSGKRPLFGPDLPQTEEIRDVLDTFHVIAELPPDNFGAYIISMATAPSDVLAVELLQRECHIKHPLRVVPLFEKLADLEAAPAALARLFSIDWYRNRINGKQEVMIGYSDSGKDAGRFSAAWQLYKAQEELINVAKKFGIKLTMFHGRGGTVGRGGGPTHLAILSQPPDTIHGSLRVTVQGEVIEQSFGEQHLCFRTLQRFTAATLEHGMHPPISPKPEWRALMDQMAVIATEEYRSIVFKEPRFVEYFRLATPELEYGRMNIGSRPAKRKPSGGIETLRAIPWIFAWTQTRFHLPVWLGFGAAFKEVIEKNVNNLNMLQEMYNQWPFFRVTLDLVEMVFAKGDPKIAGLKDRLLVSKDLWRFGDQLRNKYEETKKLLLQVAGHKEILEGDPYLKQRLRLRHAPITTLNIVQAYTLKRIRDPNYNVKVRPRISKESAEASKSADELIKLNPTSEYAPGLEDTLILTMKGIAAGMQNTG

SEQ ID NO: 29876 - protein, 335 aa, Schizosaccharomyces pombe
MAIPKVGINGFGRIGRIVLRNAILTGKIQVVAVNDPFIDLDYMAYMFKYDSTHGRFEGSVETKGGKLVIDGHSIDVHNERDPANIKWSASGAEYVIESTGVFTTKETASAHLKGGAKRVIISAPSKDAPMFVVGVNLEKFNPSEKVISNASCTTNCLAPLAKVINDTFGIEEGLMTTVHATTATQKTVDGPSKKDWRGGRGASANIIPSSTGAAKAVGKVIPALNGKLTGMAFRVPTPDVSVVDLTVKLAKPTNYEDIKAAIKAASEGPMKGVLGYTEDSVVSTDFCGDNHSSIFDASAGIQLSPQFVKLVSWYDNEWGYSHRVVDLVAYTASKD

SEQ ID NO: 29877 - protein, 135 aa, Arabidopsis thaliana
  misc_feature (6)..(6): Xaa can be any naturally occurring amino acid
  misc_feature (90)..(90): Xaa can be any naturally occurring amino acid
  misc_feature (101)..(101): Xaa can be any naturally occurring amino acid
  misc_feature (103)..(103): Xaa can be any naturally occurring amino acid
  misc_feature (110)..(110): Xaa can be any naturally occurring amino acid
  misc_feature (114)..(114): Xaa can be any naturally occurring amino acid
  misc_feature (117)..(118): Xaa can be any naturally occurring amino acid
  misc_feature (122)..(123): Xaa can be any naturally occurring amino acid
  misc_feature (125)..(126): Xaa can be any naturally occurring amino acid
  misc_feature (132)..(133): Xaa can be any naturally occurring amino acid
MASSMXSSTAVVTSPAQATMVAPFTGLKSSASFPVTRKANNDITSITSNGGRVSCMKVWPPIGKKKFETLSYLPDLSDVELAKEVDYLLXNKVGSLCLNSXLXHGFFYRXHGNXPGXXFIGXXWXXWEVPFXXCT

SEQ ID NO: 29878 - protein, 529 aa, Xanthomonas campestris pv. campestris str. ATCC 33913
MLDANLKTQLTAYLERVTRPIQIHASIDDIPKAREMLELLEDLVLLSDKISLDVHRDDNQRKPSFALTTPGQDISVRFAGLPMGHEFTSLVLALLQVGGHPSKATAELIEQVQHLDGDYQFETYFSLSCQNCPDVVQALNLAAVLNPRIKHVAIDGALFQDEVETRQIMSVPTVYLNGELFDQGRMTLEQIVAKLDTNAAKRDAAKIAAKDAFDVLVVGGGPAGSAAAVYAARKGIRTGVAAERFGGQVLDTMSIENFISVPETEGPKMAAALEQHVRQYDVDIMNLQRAEQLIPAGADGLVEIKLANGASLKSKTVILSTGARWRQMNVPGEDQYRNKGVAYCPHCDGPLFKGKRVAVIGGGNSGVEAAIDLAGIVAHVTLVEFDDKLRADEVLQRKLRSLHNVRIITSAQTTEVLGDGQKVTGLVYKDRTGGDTQHIDLEGVFVQIGLLPNTEFLRGTVELSPRGEIIVDDRGQTNVPGVFAAGDATTVPYKQIVIAMGEGSKAALSAFDYLIRSSAPVSADVAQAA

SEQ ID NO: 29879 - protein, 118 aa, Arabidopsis thaliana
  misc_feature (95)..(95): Xaa can be any naturally occurring amino acid
MEGLLKLSTLVIVGMLVTAPMASEAAISCGAVTGSLGQCYNYLTRGGFIPRGCCSGVQRLNSLARTTRDRQQACRCIQGAARALGSRLNAGRAAXLPGACRVRISYPISARTNCYTLR

SEQ ID NO: 29880 - protein, 201 aa, Rickettsia rickettsii
MICDIINLLKEDLNKADIENEIYMRLKEPYSVLKKMKRKEVPIDALKDLIACRIIVKSKALCYNALDIVKSSPHLDWLYTKDYINRPKSNGYQSLHNIMQLLHSKRNFEIQIRSENMHKDAELGRAAHLNYKEEQDRHLQKVFDITNDTILFKARQMVKQFEGFEEQIVEYEKEIMRIWHTKYDEMLKWANTAEVLIFNKD

SEQ ID NO: 29881 - protein, 947 aa, delta proteobacterium MLMS-1
MELSSEAKSARCAGDEPGAQAPGPLPLAGQIKLVGRILGKVIQDLRGPQVYEQVEELRLLCKRAAVEKRPDLRQRVQQRIADLDCREIVEVLQAYTVFFHLVNKVEQMEISRADRRHNPGPVGHVPRRESIDEAVADLKAQGAGIDRVLGLLGKLDIQPTLTAHPTEARRRSILYKQKRIAALLEELSRRDNGLDEQEALLAELEGEIGLLLATDDIRLVRPTVEDEVESGLYFVRNAIWQTVPQIYQDLRAALQRHYGECPAALPAFLRFRSWIGSDRDGNPYVTAAVSRHTWLYQRRVALRLYLEELRQLRRELSLSGRQQPPAGLLKSIEEDAAELTLSENRRRRYRYEPYRLKISYLMARLKQLEADIDAGRFPGGGDPYGAAELLADLQLLADSLQAQGFSRLVSHGRLGRMLLQVRSFGLHLVALDFRQHSRVHEEGVALLLRLAGVCDDYAALAEEQRLALLEGELANPRPLLPRNRELPPEVDELLASFRLIAEIQQHDPAALGAYIISMTHAPSDLLEVLLLAKETGLWERRDGRVVSALDLVPLLETIEDLDQAGALLRQILENPVYRAQLTARSHFQEVMLGYSDSNKDGGYWMANWALHRAQEELGEVSREYGIELRLFHGRGGTVGRGGGRANQAILALPEQVHNGRIRFTEQGEVITFRYAFSDIARRHLEQIVNAMLRTTAAAESAGLAGADAAGGPAAAPAVSEENRFLARIAAAGMEAYRELVHDPDFWAWYTRITPIEQISRLPIASRPVSRSAGEVDLEGLRAIPWVFAWTQTRYIVPGWFGTGAALNAVLAEPGGRQYLRELYRRDPFFQMVVDNARREMARVRPEIAAEYDALAEVPARFHQRITADLEMALQALPEFTGESELLARNPAVQRSIRLRNPYTDVINLLQVELLRRYHDSGGEEREALRDALFLSVNGIAAAMQSTG

SEQ ID NO: 29882 - protein, 264 aa, Pseudomonas putida KT2440
MTTPSSSLLSKVEAGVAWITLNRPEQRNALDIPTLKQLHALLDSHADDPAVRVVVLTGSGRSFCAGADLAEWAAAEAAGTLESYGWTETAHALMLRLHSLDKPTIAAINGTAVGGGMDLSLCCDLRIAAASARFKAGYTSMGYSPDAGASWHLPRLIGSEQAKRLLFLDELWGADRALAAGLVSEVCADEQLPAVAAELAGRLANGPTFAYAQTKRLIRDGARRTLAEQLEAERHAGLLCGRSQDGAEALQASVERRTPRFTGQ

SEQ ID NO: 29883 - protein, 606 aa, Leuconostoc mesenteroides subsp. mesenteroides ATCC 8293
MSDKKISAGLAALKVMEGWGVHTIYGIPSGTLSGLMDAMGHPENNIKFLQVKHEEVAAMAAVMQWKFGGKLGVAVGSGGPGATHLINGLYDAAMDNTPVLAILGSKPVRELNMDSFQELNQNPMYESIAVYNRRVATAEQLPHLVDDAIRTAIAKRGVAVLEIPADFGFSQIDANSIYSTPLYSSGPKYKEYKSAPVDNADIDAAVELLNQAKQPVIYAGVGTMGHGSAVQALSRKIKAPIITTGKNFETFDWDFEAFAGSNFRVGWKPANEAVLEADTVLFVGTNFPFSEVEGTFRNVDKFIQIDNNPAMLGKRHQNDVAILGDAGEAIDEILAKVSSVSESPWWQANIKNIQNWRDYMTKLEKKTEGDLQAYQVYNAINEHAADNAIFSIDVGNVTQLSVRHLHMTPKNMWRTSPLFASMGIGLPGGIGAKNTYPDRQVWNLIGDGAFSMTYPDVVTNVRYNLPVINVVFTNTEYGFIKNKYEDTNTYNFGVDFTDVDYAKIAEAQGAIGLTVSRIEDIDRVVQEALSYYGKGRVVVIDAKITKDRPIPVETLKLDKSLYSAETVNAYKEKYEAQELVPFREYLESEGLTSKYIKDSNDNKYSF

SEQ ID NO: 29884 - protein, 750 aa, Pseudomonas putida KT2440
MIRLHTDGLLRRLLRFILLFSLCFTVLASSVQLYFEYRREMRDIEARMALIRAGYLASLERSLWDLDEAQLDTQLRGLVDFSDVARVRLVSDDFQLLRGEAEPKGPLRIERFPLDYQPPSGPARHLGELEVSIDLGAVHHRLYATGLASLLWMGVFLCGLAVALSGLFYRLVTRHLQVMAEFARRIGAGQWQEPLRLGRRRSSRPDEIDTVANALDDMRRAILSDIERRERDRLELQDKRDELQAMVERRTASLARAKDEAEAANLAKSRFLATMSHELRTPLNGILGMAELLRGGRLEVADRQRVEALYKAGEGLLAILNEVLYFARLEEGESRAERVVFSLRQLCQEVLALLEPMAMENADTLQLQVDEQLAAYQYGAEQYLRQVLSNLLANAIKFTEHGQVQLTVQVLANNECSQRLRLSVRDNGIGIEPAVQAKIFDRFVQASEAVTQRYGGTGLGLAICKHLVEKLGGSIGLESVQGQGSCFWFELDMARGQPVSAGSPAPSPLPSLDILVVEDVALNREVAGGLLMRDGHRVSFAEDASQALQACAQRRFDLVLLDVHLPGMSGVALCRQLRSSPGPNRHSRILALTAGVQPGQVAGYLDAGMQGVLAKPLRLDSLRKALADVAPGEVASAGADMDWSLLDTHRSLLGEQKLQGLLKVLRQSLQQHATALAEALPAQDFTEVLHLAHRLAGSCDSLGFTGLATVLRGLEEAARQHDVQAMQALGEPLATQLGQASATLEQLIQS

SEQ ID NO: 29885 - protein, 423 aa, Pseudomonas putida KT2440
MGTHVIKMPDIGEGIAQVELVEWFVKVGDIIAEDQVVADVMTDKATVEIPSPVSGKVLALGGQPGEVMAVGSELIRIEVEGSGNHVDVPQPKPVEAPAAPIAAKPEPQKDVKPAVYQAPANHEAAPIVPRQPGDKPLASPAVRKRALDAGIELRYVHGSGPAGRILHEDLDAFMSKPQSNAGQAPDGYAKRTDSEQVPVIGLRRKIAQRMQDAKRRVAHFSYVEEIDVTALEALRQQLNSKHGDSRGKLTLLPFLVRALVVALRDFPQINATYDDEAQIITRHGAVHVGIATQGDNGLMVPVLRHAEAGSLWANAGEISRLANAARNNKASREELSGSTITLTSLGALGGIVSTPVVNTPEVAIVGVNRMVERPVVIDGQIVVRKMMNLSSSFDHRVVDGMDAALFIQAVRGLLEQPACLFVE

SEQ ID NO: 29886 - protein, 446 aa, Oryza sativa
MGRAFEYVILGGGVAAGYAALEFVRRNGGASSQELCIISDEHFAPYERPALSKGYLLPQDAPRLPAFHTCVGSKDELLTEEWYNEHGIVLVLGTRVISADVRQKTLLTSSGETISYKTLIVATGARAVKLEEFGVSGSDARNVCYLRNVEDADKLVGVMRSCPGGNAVVVGGGYIGMECAAALVTNNIKVTMVFPKKHCMGRLFTPKIAEFYESYYASRGVTFVKEAAVTSMQISAGKVTAVNLGNGRRLPADMVVVGVGARANTGLFDGQLVMENGGIKVNGRMQASDASVYAVGHVAAFPVKLFGRGRPAGWSTVFSLSWQFYGDNAGEAVHFGDLAPPGDGDGAAPKFGAYWVRDGRVAGAFLEGGSRQEYEAVAAAVRRGAAVADVAELERRGLAFATQATGGGGKPTCAWHATVGVAAAVSIAAFACWYGWQAPYVLKRDF

SEQ ID NO: 29887 - protein, 260 aa, Triticum aestivum
MAPSIAPPSSPSCLRGKLFPRFTGTNSQPMNSVLRCDISVSPTLASNSLRRTSSVHLANNNRIKSFHVCHAGVDPSERIVINGQASPSKTVQADAAALGTISADMAPVVDGFSADDDELDLDLPTEGFSSIPEAIEDIRQGKYVIVVDDEDRENEGDLIMAASTVTPEAMAFIVRHGTGIVCVSMKEDDLERLQLPLMVVAKENEEKLRTAFTVSVDAKEGTTTGVSAKDRANTVLALASPYSKPEDFNRPGHIFPLKYR

SEQ ID NO: 29888 - protein, 112 aa, Escherichia coli
MKLVTVIIKPFKLEDVREALSSIGIQGLTVTEVKGFGRQKGNAELYRGAEYSVNFLPKVKIDVAIADDQLDEVIDIVSKAAYTGKIGDGKIFVAELQRVIRIRTGEADEAAL

SEQ ID NO: 29889 - protein, 233 aa, Rubrivivax gelatinosus
MENTSYQNRRGEVEHYFDRTAAQTWARLTSDAPVSGVRATVRAGRDRMRTTLLSWLPQDLRGRRVLDAGCGTGAASIELARRGAEVVAIDLSPTLVGYARERLPESLGPGSIDFRSGDMLDPALGRFDHVIAMDSVIHYDAPDAVAALSRLAERTSTSMVFTFAPRTALLSLMWTVGKLFPRGDRSPAIVPVAPEQLRSLMAAHPGLQGWQWGRSERISSGFYTSQATEWKRT

SEQ ID NO: 29890 - protein, 170 aa, Corynebacterium efficiens
MTDTHGTFIPTADLVDIIGDDVRSCDTQFRNLGGRTDFHGTITTVKCFQDNALLKSILGEDNPGGVLVIDGDASLHTALVGDIIAGLGRDHGWSGVVVNGAIRDSAVIGEMEFGCKALGTNPRKSSKTGAGERDVVVSFGGVDFTPGHYLYADSDGIVVTENPVKAPASN

SEQ ID NO: 29891 - protein, 558 aa, Magnaporthe grisea 70-15
MLAKDHGLQDTNDRFLGNIQRNGTFSVVPRVSGGEITPEKLIAMGEVAKEYGLYTKITGGQRIDMFGAKKQDLLDIWGKLVNAGMESGHAYAKSLRTVKSCVGTTWCRFGIGDSVGMAVRLEERYKSIRAPHKIKGGVSGCVRECAEAQSKDFGLIATDKGFNIYVAGNGGAKPRHAELLAKDVPPSEVVPILDRYLMFYIRTADKLQRTARWLENLPGGIEYLREVVLKDKLGINAALEAAMEELVDGFFDEWAEAIQDPAIAAKFRQFANTDDKLDNMEVEVERDQLRPVHWPKEAAKEDFKGLRSRWTETAWQPVMEASYFAEADGLPNGISAAIRRGDTQLALWRIRGRYFLTQQMCPHKRAFILSDGLIGEEMSCSKEKGDNGSGITNGAAANGSLGVTNGGTNGMGVADAKRTAASGDGGGGGSCNKNGNAAPWVSCPHHKRNFDLSSGACKNDEELSIATFEVEERPDGHVYAKLPPVEELDAALGTSKWKVKLGDAGEGEHPFAELDRKIAFKGLRAKKVGLRPTAATLPLKSKNLAVAVGGGCGSAPDW

SEQ ID NO: 29892 - protein, 512 aa, Chromobacterium violaceum ATCC 12472
MGDRLYIFDTTLRDGEQSPGASMSKEEKIRIARQLERLGVDIIEAGFAAASPGDFDAIHAIAETIKDSTVCSLARANERDVRAAGEAIKPAARGRIHTFIATSPIHMEKKLRMSPDEVVDAAVKAVKIAREYTDDVEFSAEDALRSDIDFLARIFGEVIKAGATTLNVPDTVGYAVPRLTEAFFRELIARTPGGDKVVWSAHCHNDLGMAVANSLAAVLGGARQVECTINGLGERAGNASLEEVVMAVKTRRDVFGVDSRVDATQIVPASKLVSTVTGYPVQPNKAIVGANAFAHESGIHQDGVLKHRETYEIMSAESVGWSANRLTLGKLSGRNAFKTKLSELGIVLDSEEALNAAFARFKELADKKREIFDEDLHALVSDEMVTIEREDYKLVSLKVVSETGEPPLASIVFVEHGQEQHGESSGSGPVDAAFKAIEKVVGSGAELELYSVNAITKGTESQGEVTVRLSREGRIVNGQGADTDIIVASAKAYLSALNKLTIEEKMNAQAAA

SEQ ID NO: 29893 - protein, 603 aa, Sulfolobus tokodaii str. 7
MRVAVINYDFCKPDKCNLECITFCPINRSGSKAIELSDLVKGKPIIYEETCIGCGICIKKCPFEAIDIVNLPDEYGEDVIHRYKINGFKLFGIVTPKRGYIIGILGKNSTGKSTILRILSGELIPNFGDPQAKLTTDEVLDHFKGKEIYDYFYQLYNKKIRVAHKIQYVEYAAKYLKGTVNELLKRADQRGKIDEVRELLNMKSFWEKDVRYLSGGELQKLLIAATLLKDADIYLFDEPSSYLDIRERINMAYGIRELTKNKYVLVVEHDLIVLDYLADLVNIIYGKSSVYGRVSKTYSNRVGINNFLRGYLPAENVKIRQEEIKFNLKDLTDLDFNPQALQKVIWTDITKKLESFYLEVKGGYAREGEVIGIVGPNGIGKTTFMRILVGEIKPDSGEVLTEGLTLSYKPQKIVPDYDGTVQQYLENVRKDILSSSSWFYEEVIKRLNLHRILESYVKDLSGGELQKLYIAATLSREADIYVLDEPSSYLDVEERYIVAKAIKRVTRERKSVTFMVDHDLALHDYIADRIMVFSGAPGFYGIGKTPQTLSSGMNEFLKELRITFRRDMDTGRPRVNKPGSYLDRLQKETGEYYSLKVIKEESA

SEQ ID NO: 29894 - protein, 2312 aa, Aspergillus nidulans FGSC A4
MCLMSHASKWSAACLAADLPPSSWISEDILCTHLAEMDDSHILGEDLPLPPARLFQRLAQLPGYTWDQSIEPFHSTYNHWHVFGLRHAADTDASTPLATSSGPSSITRSSPRTDARPPFRHHWRSSLSESSSELSLSRTEHEFVWIPVVARVSSHVVRLEHCNHTIRPLDLIRLPSDPGDLGPLLVAIFESPGLNMLQELVAFGPAWFAIGGRNESVEPSPGEQVSLSVFLDFSIGACDCLELLHYGLRTVHGEIRPDAFHFNREARSVKLMNTGNGAKAFDNVLSEGWLTISREIGVKNKLQFIAPEQTGRMPTEPDSRTDIYALGVLFWTMLVGKPAFTGSDPVEVVQNVLGKRLPPVSAKRMDIPDAVSAVIQKMTHKAVNERYHTISSVKRDLTQISQLLGDGDSKALKDFQVAQRDVSSFFTLPSKMFGRQGEYDKVLSVVEKVARRQQSSYSKAATQISSRLGSNSSLSEGRVDSFDLASVSSDSGSFQLNPRTSTNGTAYNIGRASTHESFHSTESSLSTPKPVTSKPKSPVDPRQTWDNTDQDVAQSYDSPMVPISRHKNPSKFRRYGKCEVIAISGAAGIGKTDLLNRIQPAIRKLGYIGIARLDRARRVPFEPFAKVLASLLRQIFSERDVTTEYHNSVRCALRPMWSTLHRVLELPEQLMSPGTNEKQVSPKCTAAQYIFKDMTRGEPSKTPLPRLSQGQTSVDFFLTNAASKNMRLMETFLDILRTLSQFKMICVCIDDLHYADDETMELITNIVRMKIPCVLILTSRKSELESDAIKSLFENDNPSVTRIILKPLSEEEVMEIVAATMHQPPNPTLTPLAAVIQEKSVGNPFYVRMMLETCYSTNCIWYSWKNSMWEFDLDRIFTEFVAPRYGEGLGLGFITRRLQELPPAARSILVWGALLGSPFSFSLVQKLLTSEFLYSSEDDEVVDLTCPQNANLIRQSEADIVVGLQFAVQANFIIPGSTDDEFSRYAMARHVAQASRIIKSRVVERLDYRKILWDAAQIAAQSGARPTALWYYRHCLDLLQDNHWDDNGIDVYYDETLRLYTATAEMAWSQGFNSEALDLLYKIFHHAKTAVCKSRAWIIKAKLFAQLGDHPRSMNSLLTCLEELGVHLREPTSYENCDAAYKVLKGHIERADLSEMAHKSVSKDINTVTIGTVMAEAMSVTFWDDGLTFYRMAIEMMNHHLFRGGFIQICIGCSHLAMIAFSRFRDLDFAVKLSELALTLLDRCPELWTRSRGSIVYNFYVGHLRGPLASTLPALEASVETSLVLGDPYITLITISAMAMTRLFLGHDLVLVEVFCNDSPMEINDWEVDTRGGATLVAVRQVARALQGKTEYRVADTVLNDDSHITTEYIDFLEKNASNPDRPRDIYYALSMIPLYLYGHHEKAIKLATEMDESISRLWSSRVSYVVYFYAALSHLTMHNDNPTTAYLDGKLDVVLKYKAEIDFARRACDANYGMWALILEALVYEVQDDHTSALQSFEAAIDHCQVHQYPMEEALALELYGEFLVRRGAKRAARSVMQDAITAWAAISAVGKASQLTEKHEWLLRTATSCRSVDVGCQTVDSLLGIDQDVGQEHVGVNQALQEEDRKHRWLEQSGATATTAGERSLDISGVGLDIIDLSSILESSQVMSSELQIDKLMTKMIEIVLESCNGSDFAVIATNFDNHFTITAAGDLERGQRSFVDGLPFSEMDDKMAQQITHYVMRTREEVLVHNVFEDERFSNVSEAYHTRNPMSRSVIALPIMQGEHLHGVIQVEGKPNSFTQRNLVVLHLLCNQIGISLSNALLFREIRKVGATNASMVESQKRALTQARDAEQKAKVAEAEAKHNVKLKEDAAKAKSIFLANISHDLRTPMNGVIGLSELLKGTKLDREQDEYVESIRVCADTLLTLINDILDFSKLEAGKMKISTVPLNIKETISEVVRALRYTHRDRGLETIEDLDEVPPDLVVLGDPVRLHQIFMNLLSNSYKFTPKGSVTVSAKVTREGKGRVRLECSVSDTGIGIPDEQKPRLFRPFSQADSSTARSYGGSGLGLSICKAIIEDVLGGAIWLDSVPGAGTTVTFHLSFNKVKSESGDKNAPWSKSAITDKTAPRPVARDLSMIPRDQIRVCIAEDNPINQKIAVRFVTSLGLQCEAYSDGQQAVDALRARSKEGNPFHVVLMDVQMPTLDGYNATREIRKDPDPNVNEVLVIAMTASAIEGDREKCLEAGMNNYLPKPVRSNILSDMLDNYLAPVPTFTRTRMSPAARGRGSISTDSASVASNSISIASSGATSVSGSDGAGHALPEQKSQSHST

SEQ ID NO: 29895 - protein, 362 aa, Zea mays
  misc_feature (289)..(289): Xaa can be any naturally occurring amino acid
MLASLRYLAGTAGPSGFGSRTTAEEAAAGDLRHVTAIITGATSGIGAETARVLAGRGARLVLPARSLKAAEEARARVRAECPGADVAVLPLDLSSLASVRRFVARFLDLGLPLNLLVNNAGKYADRFAVSEDGVEMTFATNYLGHFLLTRLLLDKMADTARATGVQGRIVNVSSTIHSWFPGDGDALGYLDRVTRRKIPYDPTRAYALSKLANVLHTRALADRLSEMGANVTANCVHPGIVRTRLIRDRDGLITNTVFFLASKLLKTIPQAAATTCYVAAHPAVAGVSXGKYFADCNEASPSRLGASCEEAARLWAFSENVTAEKVQRTTTTTGVHVAVGTGLLRPQAHQSSDADRAMALAA

SEQ ID NO: 29896 - protein, 270 aa, Staphylococcus warneri
GILVVSAADGPMPQTREHILLSRNVGVPALVVFLNKVDMVDDEELLELVEMEVRDLLSEYDFPGDDVPVIAGSALKALEGDEKYEEKILELMQAVDDYIPTPERDSDKPFMMPVEDVFSITGRGTVATGRVERGQIKVGEEVEIIGLHDTSKTTVTGVEMFRKLLDYAEAGDNIGALLRGVAREDVQRGQVLAAPGSITPHTKFKAEVYVLSKDEGGRHTPFFSNYRPQFYFRTTDVTGVVQLPEGTEMVMPGDNVEMTVELIAPIAIED

SEQ ID NO: 29897 - protein, 399 aa, Wolbachia endosymbiont strain TRS of Brugia malayi
MTTAVEATAQVVEAFGKPHVNVGTIGHVDHGKTTLTAAITKHYGNFVAYDQIDKAPEERKRGITIATAHVEYQTEKRHYAHVDCPGHADYVKNMIVGAAQMDAAILVVSGVDGPMPQTREHILLAKQVGVGYIVVYINKADVSDPDMIGLVEMEVRELLSKYGFPGDEVPVVIGSALKALEDDDGEYGKKSIDKLMERLDDYVEVPPRSVDLPFLLPIEDVFSISGRGTVVTGRIEKGEIKIGDEIEIIGLKATQKTTCTGVEMFKKLLEKGSAGLNVGILLRGTKREEVERGQVLAKPGTITPHRKFKAEVYILKKEEGGRHTPFFANYQPQFYLRTTDVTGSIKLLEGKEMVMPGDNVSIEVELQVPIAMDKGLRFAIREGGRTVGSGVVSEILEWV

SEQ ID NO: 29898 - protein, 334 aa, Ralstonia metallidurans CH34
MQAPANPSSSSAAVSSSMPHKLVIASRESRLAMWQAEHVRAALQQYYPSCDVSILGMTTRGDQILDRTLSKVGGKGLFVKELEVAMSEGRADLAVHSLKDVPMELPEGFTLTAVMEREDPRDALVSAQFASLEEMPAGTVVGTSSLRREAALRSRFPHLVIKPLRGNLDTRLGKLDRGEYGAIILAAAGLKRLGLGDRIRALIAPESSLPAAGQGALGIEIRADRPELAEWLAPLNHLPTLLAVSAERAVSRRLGGSCQVPLAAHARWRDASLQLDAFVALPDGSRQVRAHATGPVATVADAEALGTAVAGDLLAQGADGVLAALSTDSAAGPA

SEQ ID NO: 29899 - protein, 1009 aa, Ralstonia metallidurans CH34
MTQPAARPTGRSRSTGRKSVTPASGQLDPEGASPKTPKATKPRTKAAARPKLAVVAAKGAAPTAAATTIPARRTADKDLPLREDIRFLGRLLGDCVREQEGDAAFDLVETIRQTAVRFRRENDRAAGTELDRLLKRLSRDQTNSVVRAFSYFSHLANIAEDQHHNRRRRVHALAGSPPQPGSLSRALQAIDAAGVTGKQLREFLDDALIMPVLTAHPTEVQRKSILDAEREIARLLAERDLPMTTRERDHNTAQLRARVTTLWQTRMLRNTRLMVVDEIENALSYYRTTFLQGIPRLMAELEEDIAEVFPRRSKTGATPAPLAPFLQMGSWIGGDRDGNPNVTAETLEHAARQQATLLFDWYLDELHALGAELPLSSLMVDASPELLALAEASPDHSEHRADEPYRRALIGMYARLAATSQLLTGHVAQRHPVADVAPYENAEAFAADVQIVVDSLRTHHGEALARGRVDALVRAIAVFGFHLASIDMRQVSDVHEAVIAELFATAGIESDYAALPEARKLELLLAELRQPRLLTLPWHDYSEQTRSELAIFAMARDLRARYGARIARNYIISHTETLSDLIEVMLLQKEAGMLRGTLGSKTDPARMELMVIPLFETIEDLRNAAGIMESLLDLPGFDSVIAHHGVEQEVMLGYSDSNKDGGFLTSNWELYKAELALVKLFEERRVKLRLFHGRGGTVGRGGGPTYQAILSQPPGTVNGQIRLTEQGEIINSKFANAEIGRRNLETVIAATLEASLLPTQNAPKDLATFEGVMQQLSDHAFSAYRDLVYETPGFKDYFFATTPITEIADLNLGSRPASRKLMDKKHRRIEDLRAIPWGFSWGQCRLLLPGWFGFGSAVQALLDAAPDEKSRKATVATLKRMVKSWPFFSTLLSNMDMVLAKTDLAVASRYAGLCEDTALRKAVFSRISAEWHLTSDMLGLITGRQERLADNPLLARSIKNRFAYLDPLNHLQVELLKRYRAGKDGDDVRVRRGIHLTINGVAAGLRNSG

SEQ ID NO: 29900 - protein, 112 aa, Arabidopsis thaliana
MAFALRFFTCFVLTVFIVASVDAAITCGTVASSLSPCLGYLSKGGVVPPPCCAGVKKLNGMAQTTPDRQQACRCLQSAAKGVNPSLASGLPGKCGVSIPYPISTSTNCATIK

SEQ ID NO: 29901 - protein, 317 aa, Treponema denticola ATCC 35405
MSEKYDLVIIGGGPGGMAAGIYAARSKLKTVILEEKPNQGGQCYITEEIENYPGFPESSGPALTEAFKKHAEKFGVEFKRARAEKIELVPNSPTRIVHGSDGVKYECLAVVVATGASARELGCKGEKEHWGKGVSYCATCDGAFFEECEIVVIGGGDSAVEEAMYLTKFADKVTIIHRRDELRAAKSIQEKAFANPKMAFKWNAVVEEVCGEGLVDSVILKDTKTGETSKFDTEGVFVFIGHNPQTAFIQGLVDLDENGYILTNGKMETNVPGIYGVGDVIQKESRQVVTAAADGALAGIWAGHYIDDIKAKMAMKK

SEQ ID NO: 29902 - protein, 321 aa, Rhodopseudomonas palustris CGA009
MPSPVQAKVVIIGSGPAGYTAAIYASRAMLEPILIQGMQPGGQLTITTDVENYPGFADVIQGPWLMEQMEKQALHVGTRIKTDLVVDLDLSQQPFRLTCDSGDVYLADTLILATGAQARWLGIPSEQTYKGFGVSACATCDGFFYRGKDVVVVGGGNTAVEEALFLTNFAASVTIVHRRDHFRAERILQDRLFKHPKIKVIWDVAVDEICGAENPTKVTHVRLKNVKSGTTSEVKADGVFIAIGHAPATELFKDQIKLKPSGYVEVAANSTATSVPGVFAAGDVADETYRQAVTAAGMGCMAALEAERFLALRAGDRQAAE

SEQ ID NO: 29903 - protein, 582 aa, Solanum tuberosum
MEILRRSSSLWVLPILLLCFFINNGVFVDASHKVYMHLQSTTSHVDVSKVHRTGYHFQPPKNWINDPNGPMYYNGVYHLFYQYNPKGAIWGNIVWAHSVSKDLINWIPLEPAIYPSKVFDKYGTWSGSATILPGNKPVILYTGIVDANKTQVQNYAIPANMSDPYLRKWIKPDNNPLIVADKTINKSQFRDPTTAWMGRDGNWRILVGSVRNHRGKVIMYKSNKNFMKWTKAKHPLHSAPGTGNWECPDFFPVSLKNKDGLDTSYNGKDIKHVLKVSFDVTRFDHYTIGTYDTKKDKYFPDNTSIDGWKGLRLDYGNYYASKTFFDSGKNRRILLGWANESDTVDNDVRKGWAGVHPIPRKIWLDPSGKQLVQWPVQELETLRKKKVQLNNKKLNKGEKVEIKGITVAQADVEVIFSFTSLDKAEPFDPSWADLYAQDVCAIKGSTVQGGLGPFGLLTLASKNLEEYTPVFFRIFKAHDKYKVLMCSDASRSSLKNETTMYKPSFAGYVDVDLADKKLSLRSLIDHSVVESFGAGGKTCITSRVYPTLAIFDKAHLFAFNNGAERITIETLNAWSMANAKLH

SEQ ID NO: 29904 - protein, 314 aa, Rubrivivax gelatinosus PM1
MIDITLQNFEAELIQASMQTPVLLDIWAPWCGPCKSLGPVLEKLEADYAGRFALAKLNSDDQPDIAGQLSQAFGVRSIPFCVMFVGGQPVDGFVGALPEAQIRSFLDKHVPSEDALAAEEEALEAEQLAAEGDNDAALAKLSDALAIAPGDDAIRADYVKRLLEAGRTADARRVYEPLAPKAIVDARASALGLWLDACEAAERARSPEALAAAIGADRRDFAARFELAQTLLAAQRPTEAMDELLEILMRDKAWSDERARKLYVAILELLSKPPPKVASPAEAKGTLEIAGKAAAVASDPVIDGYRRKLSMVLF

SEQ ID NO: 29905 - protein, 137 aa, Photorhabdus luminescens subsp. laumondii TTO1
MRLLHTMIRVGDLQRSINFYTEVLGMRLLRTSENTEYKYSLAFVGYADESEGAVIELTYNWGVDHYEMGNAFGHIALGVDDVAATCESIHKAGGSITREAGPVKGGTTIIAFVEDPDGYKIELIENKNASNALGNSI

SEQ ID NO: 29906 - protein, 638 aa, Magnetospirillum magnetotacticum MS-1
MCGFAGFLDLTQATPDRERVVRAMAATLLHRGPDDDGAWVDDGAGVALGFRRLAIIDLSPQGHQPMTSHDGRWVISFNGEIYNHEALRARLGEDIGWRGHSDTEVLLQAVSAWGMERALAEFDGMFAFALWDRQDRVLTLARDRFGEKPLYWTQSGGHLLFGSEIKALRAHPAWTGGIDRDALALYMRLGWITAPHTIHSGVFKLEPGHVMRVSEGQISTQAYWSAAECAAGVENGFTGNAEAAADRLEELLRQSVRLRMQADVPVGVFLSGGIDSSITAALMRQLSSEPVHSFTIGFDQSGLDESPHARAVADHLGTIHTEVRISDAEALAQVPRLPLLYDEPFADAAALPTALLAQVTRKSVTVALSGDGADELFGGYGIYRSIPKDWGRLRGLPGGLKSLGALGARQLAEPAEGLAALAGRFAKRRSHPGHRLRREAERLEVQSLAGLLGLHYSRWRGMPALVPGAREAQSLFSAPTPALKDDALATMVLDACGYLPDDLCVKTDRATMGASLEARLPFLALEIAQFAWSLPTGLKIEGETGKAVLRRVLYRHVPRALVDRPKMGFEVPLRRWLNGQLRDWADDLLSEDRLRRQGFLDTALVAQCWREHRSGAKNWQNEIWHALMFQAWLDSVNP

SEQ ID NO: 29907 - protein, 141 aa, Arabidopsis thaliana
  misc_feature (12)..(12): Xaa can be any naturally occurring amino acid
  misc_feature (23)..(23): Xaa can be any naturally occurring amino acid
  misc_feature (26)..(26): Xaa can be any naturally occurring amino acid
  misc_feature (31)..(31): Xaa can be any naturally occurring amino acid
  misc_feature (41)..(41): Xaa can be any naturally occurring amino acid
  misc_feature (46)..(46): Xaa can be any naturally occurring amino acid
  misc_feature (60)..(60): Xaa can be any naturally occurring amino acid
  misc_feature (70)..(70): Xaa can be any naturally occurring amino acid
  misc_feature (82)..(83): Xaa can be any naturally occurring amino acid
  misc_feature (96)..(96): Xaa can be any naturally occurring amino acid
  misc_feature (98)..(98): Xaa can be any naturally occurring amino acid
  misc_feature (100)..(101): Xaa can be any naturally occurring amino acid
  misc_feature (105)..(105): Xaa can be any naturally occurring amino acid
  misc_feature (107)..(108): Xaa can be any naturally occurring amino acid
MAVPLLTKKVEXKRSAKFIRPQXDRXITVKXSWRRPKGIDXSRVRXKFKGVTLMPNGGYXSDKKTRHYLXPNGFKKFGAPNXXELELLMMHKRNYXAXIXXNVSXKXXKGNLLNVCLPKRWLGSRNPKKNKEKKLGVSFWG

SEQ ID NO: 29908 - protein, 301 aa, Triticum aestivum
  misc_feature (240)..(240): Xaa can be any naturally occurring amino acid
  misc_feature (259)..(259): Xaa can be any naturally occurring amino acid
  misc_feature (281)..(281): Xaa can be any naturally occurring amino acid
MDGGGGVGGGMGPVGGGVGGMVGPVGVGGGGGGSDVELVSKTLQFEHKLFYFDLKENPRGRYLKISEKTSTTRSTIIVPIAGVGWFLDLYDYNIRTDERDVFSKELRLDSKVFYFDMGENKRGRYLKVSEASVNRNRSTIIVPAGSSGEQGWEAFRNVLLEINDEASRLYVLPNHPSQEHLEPPERLRGLSDDVGAGLIAGHGRQSASVPEVDVEGPPIEEFIVVGVPQVIRADHQRVFXDLGRKNRGHLVEGFRRTRXAYSSPKILPLTGWKQSNPRVGXFGDLRRDEVNGMRGGTSPLG

SEQ ID NO: 29909 - protein, 189 aa, Brassica napus
MAEVMLPMKMEMANDPSKFTSPDLLHVLAVDDSHVDRKFIERLLKVSSCKVTVVDSATRALQYLGLDVNEKPIGCKDLKVNLIMTDYSMPGMTGYELLKKIKESSAFRDVPVVVMSSENILSRIDRCLEEGAEDFLLKPVKLSDVRRIRDSLIKVEDLSFTKSINKRELETENVYSLDSSVPLQLKRTK

SEQ ID NO: 29910 - protein, 815 aa, Haemophilus influenzae R2866
MRVLKFGGTSLANPERFSQAAKLIEQAHLEEQAAGVLSAPAKITNHLVALSEKAALNQSTDTHFNEAIEIFYNIINGLHTENNQFDLNGTKALIDAEFAQIKGLLEEIRQAGKVEDAVKATIDCRGEKLSIAMMKAWFEARGYSIHIVDPVKQLLAKGGYLESSVEIEESTKRVDAANIAKDKVVLMAGFTAGNEKGELVLLGRNGSDYSAACLAACLGASVCEIWTDVDGVYTCDPRLVPDARLLPTLSYREAMELSYFGAKVIHPRTIGPLLPQNIPCVIKNTGNPSAPGSIIDGNVKSESLQVKGITNLDNLAMFNVSGPGMQGMVGMASRVFSAMSGAGISVILITQSSSEYSISFCVPVKSAEVAKTVLETEFANELNEHQLESIEVIKDLSIISVVGDGMKQAKGIAARFFSALAQANISIVAIAQGSSERSISAVVPQNKAIEAVKATHQALFNNKKVVDMFLVGVGGVGGELIEQVKRQKEYLAKKNVEIRVCAIANSNRMLLDENGLNLEDWKNDLENATQPSDFDVLLSFIKLHHVVNPVFVDCTSAESVAGLYARALKEGFHVVTPNKKANTRELVYYNELRQNAQASQHKFLYETNVGAGLPVIENLQNLLAAGDELEYFEGILSGSLSFIFGKLEEGLSLSEVTALAREKGFTEPDPRDDLSGQDVARKLLILAREAGIELELSDVEVEGVLPKGFSEGKSADEFMAMLPQLDEEFKTRVATAKAEGKVLRYVGKISEGKCKVSIVAVDLNNPLYKVKDGENALAFYTRYYQPIPLLLRGYGAGNAVTAAGIFADILRTLQH

SEQ ID NO: 29911 - protein, 227 aa, Medicago truncatula
MYPTTNSVSSSSSDMSLPNSEGSHWMSICNEEMRLAATTPKKRAGRKKFKETRHPVYRGVRKRNLDKWVCEMREPNKKTKIWLGTFPTAEMAARAHDVAAMALRGRYACLNFADSAWRLPKPATTQAKDIQKAATEAAEAFRPDKTLLTNHNDNDNDNDKENDMAVVATATEEQSMICMEEKEEGVMNMQEMWSNMALMSPTHSLGYYEYQYINEDFQDEEVSLWSF

SEQ ID NO: 29912 - protein, 220 aa, Streptomyces avermitilis MA-4680
MPAAATVLTARALLLDMDGTLVNSDAVVERCWRRWADRHGLDADEVMKVVHGRQGYASMAVLLPDRPMEQNFADNARMLAEETADMDGVVEIPGAFAFLASLAGLPHALVTSADVGLSTARMAAAGLELPDVRVTAESVGASKPDPEGFLKGAAELGVAPEDCVVFEDSGAGIEAGRSAGMRVVGVGPRAAAHRPDVVVRDLTQVRVESATDGTIRLHVG

SEQ ID NO: 29913 - protein, 674 aa, Saccharophagus degradans 2-40
MKRLQPSQFHQAEKAVQKRLGVADMVAQHSEGYIRSTMPGQHRDFFTNLPMVIVSITDFDGFPWPIPLHGKPGFIKSPNANTLEIETYPTLKDVLKLNFKKSQKIGILGIELHTRRRNRMNGTIKEINNNSFLVICEQSFGNCPQYIQKRELHWVDTPQKCLQTEDIFLTNTLTSTCAEWIESSDTFFISSRTKRLSTDKRDGLDVSHRGGKPGFVKVENDTLYFPDFSGNQFFNTLGNIQSDSRVGLYFPDYESGKIILISGTAKIIWDKELTRIFEGAERIISVKVRNCLILDSFLPMRGVLTELSPSLIRTGTWENPQEKSAARVYKQFKIIKKIKESRDVTSFYIRPLDGSALSSYLPGQFLPISIKQPHTSSTCLRTYTLSQAPLSNAYRFSVKREKFGLASRILHDTINTGDSLYVSQPEGKFTLQTNKKTNVLLSAGIGITPMIAMLQGLIREVEKGEKPQDVYFIHSTQNSETHTFANELKHLNKRHKWLQLYTIYSQPKLNDKLGQHYDVSGRISLDLLRKILPTDNFDVYLCGSESFMRSSYTNLKAMGIAESRIFYEFFDDGSFESHQLNKFQTAQRAEIYFAKSNITATWTPNDGTLLQFAEKMGLKPMYSCRTGNCGTCSCTLSTGEVTYANKPGYTPANGSALICCARPALNTTKLTFHI

SEQ ID NO: 29914 - protein, 519 aa, Medicago truncatula
MASSESNSQMKVVHGDAGYILEDVPHLSDYVPNLPTYPNPLRSNPAYSVVKQYFVHMDDTVPQKVVVHKDGPRGVHFRRAGPRQKVYFRSDDVIACIVTCGGLCPGLNTVIREIVCGLSYMYGVDKVLGIDGGYRGFYSKNTITLTPKVVNDIHKRGGTILGTSRGGHDTGKIVDSIQDRGINQVYIIGGDGTQRGAAVIYEEVRRRGLKVAIAGIPKTIDNDIPVIDRSFGFDTAVEEAQRAINAAHVEAESVENGIGVVKLMGRYSGFIAMHATLASRDVDCCLIPESPFYLEGKGGLYEFITKRLKESGHMVIVIAEGAGQDLLTESMQDMDQKDASGNKLLQDVGLWISHKIKDHFAKENKMAIVLKYIDPTYMIRAIPSNASDSVYCTLLAQSAVHGAMAGYTGFTAGLVNGRHTYIPFNRITEKMNNVVITDRMWARMLSSTNQPSFLKPKDVHQIMKAGQSPTQLLEGSNCNGGGEEAKKVEQIPTQLMEGDKSKDNQKSRNLADSDSCIKK

SEQ ID NO: 29915 - protein, 400 aa, Rubrivivax gelatinosus
MQLETFDVVVVGGGPAGATAATEIARQGRSVLLLDRAGRIKPCGGAIPPRAIRDFGIPDELIVAKALCARMISPTDVKVDIHIENGYVGLVDREQFDEWLRERARQCGAVRRTGTFERIDRDADGCAIVRYRPHEKGERGEGQEAAVRARAIIGADGARSEVARQQISCAHEVEYVFAYHEIIEAPEPGHPDYDPSRCDVYYRGTISPDFYGWVFPHGKTMSVGTGSADKGFSLRNATAKLREDAGLANCKTIRREGAPIPLKPLRCWDNGRDVVLAGDASGVVAPASGEGIYYALAGGRFAAEAVLEMLRTGDAKALAGARRNFMREHGRVFWILGILQRFWYSSDKRRERFVSICKDKDVQQLTFDSYMNKRLTRRKPMAHVRIFFKDIAHLLGLARV

SEQ ID NO: 29916 - protein, 117 aa, Streptococcus constellatus subsp. pharyngis
MTKIYDFSIFDQNNRSISLEIYKGNVLLIVNTATGCGLTPQYKGLQHLYTRYQNQGFEILDFPCNQFMGQAPGTAEEINRFCSLHYQTTFPRFAKVKVNGKEADPLYIWLKEQQAGP

SEQ ID NO: 29917 - protein, 261 aa, Corynebacterium diphtheriae
MLALLRFVANLTSMTTGKLILLRHGQSEWNASNQFTGWVDVNLTEKGEAEAKRGGELLKAQGVLPSVVYTSLLRRAIRTANIALNAADRHWIPVVRDWRLNERHYGALQGLNKAETKEKYGDEQFMAWRRSYGTPPPELEDSSEFSQANDPRYANLDVVPRTECLKDVVERFVPYFKEEILPRVKNGETVLIAAHGNSLRALVKHLDNISDADIAELNIPTGIPLVYELDEAGTVLNPGGTYLDPEAAAAGAAAVAAQGAK

SEQ ID NO: 29918 - protein, 591 aa, Triticum aestivum
  misc_feature (122)..(122): Xaa can be any naturally occurring amino acid
  misc_feature (129)..(129): Xaa can be any naturally occurring amino acid
  misc_feature (508)..(508): Xaa can be any naturally occurring amino acid
MLMTVHLQVWLAGLACMFSTGIVFQILVRPCSNGEGVFFCPQSPKACSIVGKRYRTDYHFQPPKNWINDPCGSMYYNGVYHEFYQYNPNGSYNPNISYNIVWGHSVSMDLINWINLEPAIEXDTPSDIXGCWTGSATILSGDQPIIIYTGLLDIQKHQVQNIALPKNRSDPYLREWTKAHNNPVIQPVVPGLNSSQFRDPTTGWIGPDGLWRIAVGAELNGYSAALLYKSEDFLNWTRVEHPLYSSNSSNMWECLDFFAVLPGSGGGLDLSSAIPNGAKHVLKVSMNCTDDVYMIGVYDLKRDAFVPDTVLNDSRLWPRIDYGNFYASKSFFDSKHGRRIIWAWSSETDSSSDDVAKGWAGIHSIPRTIWLDSHGKQLLQWPVEEIESLRTNEINHQALELKKGDLFEIKGIENLQADVEIDFELTSIDDADPFDPSWLFDAEKHCREAGASVHGGIGPFGLVILASDNMEEHTDVHFRIYKSQQNYMVLMCSDLRRSSLRPGLYTPXAYGGFFEFDFEKERKISLRTLIDRSAVESFGGGGRVCIMARVYPVALADDISCAHMYAFNNGSATVIVPQLRAWSMRRAQASF

SEQ ID NO: 29919 - protein, 303 aa, Nostoc punctiforme PCC 73102
MARITTPFGRHSTASEVAQGIDLSGKRAIVTGAASGIGVETARALAHAGAEVTLAVHNVDAGAKTAADITAITGNQNIHVAKLDLTDRGAIAKFIAAWNEPLHILVNNAGVMALPEQHTPEGWEMQFATNHLGHFALTLGLHDALAADGAARIVSVSSSAHMLSPIVFDDIHFAFRPYDPWLAYGQSKTANVLFAVAGTGRWFRDGITANALMPGAIATNLQRHVGGIQTPAELQKTPEQGAATSILLATSPLVEGIGGRYFEDCNEATIVTQQTKDYSGVAPYALNTNNADRLWEESLRLLA

SEQ ID NO: 29920 - protein, 288 aa, Escherichia coli
  misc_feature (246)..(246): Xaa can be any naturally occurring amino acid
SILIDKNTKVICQGFTGSQGTFHSEQAIAYGTKMVGGVTPGKGGTTHLGLPVFNTVREAVAATGATASVIYVPAPFCKDSILEAIDAGIKLIITITEGIPTLDMLTVKVKLDEAGVRMIGPNCPGVITPGECKIGIQPGHIHKPGKVGIVSRSGTLTYEAVKQTTDYGFGQSTCVGIGGDPIPGSNFIDILEMFEKDPQTEAIVMIGEIGGSAEEEAAAYIKEHVTKPVVGYIAGVTAPKGKRMGXAGAIIAGGKGTADEKFAALEAAGVKTVRSLADIGEALKTVLK

SEQ ID NO: 29921 - protein, 295 aa, Anaplasma phagocytophilum HZ
MSVLVDKNTKVICQGFTGSQGTFHSEQAIAYGTNMVGGVTPGKGGTEHLGLPVFDTVAQAKEATGANASVIYVPAAFAADAILEALEAEIELIVCITEGIPVLDMVRVKRALRGSRSRLIGPNCPGIITPEECKIGIMPGYIHGKGNVGVVSRSGTLTYEAVAQTTAVGLGQSTCIGIGGDPVHGLTFAECVELFMNDDDTHCIVMIGEIGGSEEEEAVEYMQSLEKKKPMIGFVAGQTAPAGRRMGHAGAITSGNSGTAKGKIEFMERAGVVVAATPAVIGKTVLEVMQSQGLV

SEQ ID NO: 29922 - protein, 111 aa, Taraxacum officinale
EVPTGWKFFGNLMDAGLCSVCGEESFGTGSDHIREKDGIWAVLAWMSILAHKNKDNLSSGKLVTVEDIVKQHWATFGRHYYTRYDYENVDAGAAKDLMAHLVKLQSSLSEV

SEQ ID NO: 29923 - protein, 415 aa, Mesostigma viride
MAAATFANFTGLKATSLFSAKSADEAFAARLAPVQATGSSQKQVTEAKLKVAINGFGRIGRNFLRCWVGRENSPLEVVAINDSGGVKQAAHLLKYDSMLGTFKADVKVISETALAVNGKTIEIVSSRDPLQLPWAKMGVDLVIEGTGVFIDGPGAGKHIIAGAKKVLITAPAKGAEIPTYVVGVNEKDYTHDVSNIISNASCTTNCLAPFAKVLDENFGIVKGTMTTTHSYTGDQRLLDASHRDLRRARAAALNIVPTSTGAAKAVSLVLPKLKGKLNGIALRVPTPNVSVVDLVINTTKKGMTAEEVNAAFRKEANGAMKGILAVSDLPLVSIDFRCSDVSCTIDSSLTMVMGDDMVKVVAWYDNEWGYSQRVVDLADIVANNWPGMVQETGSDPLETFCNTNPDADECRVYND

SEQ ID NO: 29924 - protein, 211 aa, Bifidobacterium longum DJO10A
YGVPGILSGAALVFFAFIGFDVVATASEETKNPHKNVPLGIGVGMLLIIVMYMLVAVVTTGMVSYADLAKQDSPSLATAFELVGADWAAKIISFGIVLGLATVVMVLLLGLTRIVFAMSRDGLLPRGLSKTGKHGTPAALQIVVGAVVALVAAFFDIGVLSDMVNIGTLSAFTLVAISIPIMRKKRPDLPRAFKMPGSPWIPILIAVANFW

SEQ ID NO: 29925 - protein, 164 aa, Francisella tularensis subsp. holarctica
MRSFLSRLRWHCHFMQKLEDQPSIEYENLHSAYDQLRTELLNQQCFEAWKTGNTGYPMIDACMRALIATRWLNFRMRAMLMSFASYHLWLDWRVTSLYLAGLFTDYEPGIHYSQVQMQSGTTGINSIRIYNPIKQSIDQYPNVEFIRRWLPELENVSNENIHTP

SEQ ID NO: 29926 - protein, 638 aa, Streptomyces verticillus
MRPVCGIVAIRSADGGLDGGELTAPMADLRPRGPDGEGTWVSPTGRAALGHTRLAVIAPDAGRQPVAGPDGTVRLVVNGEFYGYREIRAELRAAGCRFRTGSDSEIALHLYLRDGRRALERLRGEFAFVLWDERRATLFAARDRFGVKPLYYTERDGRLYVASTVRALLSCGAPARWDTAAFAAHLQLGLPPDRTLFAGIRQLPPGCHLIADAHGTRVTPYWDLDYPPAGELAARGSLDDHLDAVRERTDEAVRLRTVADVPLACHLSGGLDSSAVAASAARHTRLTAFTVRFDDPAFDESAVARRTAAHLAIDHREVASERAHFADHLRDVVRAGEMVQENSHGIARYLHSAHIKKAGFTAVLAGEGGDELFLGYPQFRKDLTLSLSADARDKADRGYARLVAAGLLPPYLRTLLGTLGFLPSWIVDRHLAVTQPVAALLRPDFAAELARADAAAPLLAAGAGLLAGRAPAHQATYLFAKTWLPGYLLAAERLDAAQAVEVRLPLFDHHLFDLVRHTPPAWYDKDGTGKYPLRAAMRHRLPREVTEGRKQGFLAPPMADDDTLLDALRERLAGPGAGDDPFFDPHAVRALLDRLAAAPPGQRSGGEKLLQLVASTAELADEFGLTTAPSGQKGGNGG

SEQ ID NO: 29927 - protein, 412 aa, Rickettsia rickettsii
MKENFNVSKLKNGLTILTYNMPYVNSVAINLIAKVGARYENVEEDGISHFLEHMAFKGTKTRTAKQIAEAFDSIGGHFNAYTGHENTVYYARVLSENCDKALNILADIIQNSIFSDEEIAKEYQVIMQEIAHHQDNPDDLVYEKFYNKVYREQPLGKSILGTAKTLATFTKEHFFNFIDKHYNAENLYLSIAGNIDHDKIVIIAEQLFSSLKQGVKSSFIPAKYIGGHGFINKELEQTSLVLGFEGTSYINLEKLYQTHLLSIIFGGGMSSRLFQSIREKLGLAYAVGSYNSAYFDSGVFTIYASTAHDKLELLYREIKNEIIKMTEQVSTEEILRAKTQLRSNLQMAQEKNTYKSEEIGKNYSVFGQYLSPEEIMEIIMSIQADDIINTANKIFSGTITSAIIGPNDLQGF

SEQ ID NO: 29928 - protein, 402 aa, Bacillus cereus E33L
MLSEKTIEIVKSTVPLLQEKGVEITTRFYEILFSEHPELLNIFNHTNQKKGRQQQALANAVYAAATYIDNLEAIIPVVKQIGHKHRSLGIKAEHYPIVGTCLLRAIKEVAGAPDEVLNAWGEAYGVIADAFISIEAEMYEEAAHKEGGWKDFRNFVVVKKVKESDVITSFYLKPEDGGKVSSFIPGQYVTVQINIEGETYTHNRQYSLSDAPGKEYYRISVKKEKGVDTPDGKVSNYLHDHVKEGDMLPVSAPAGDFVLNMDSTLPVVLISGGVGITPMMSMLNTLIEQDSKRNVCFVHAAINSNTHAMKEHVEAVDNEYEQVKAYTCYSAPTQKDLEMKNFDKEGFVEREWLQTIIPTTEAEFYFCGPVPFMKHINAVLTDLGVKQEHIHYEFFGPAASLQ

SEQ ID NO: 29929 - protein, 170 aa, Prochlorococcus marinus subsp. pastoris str. CCMP1986
MLSSIDKFLKLMVVDVQNTTVVSANGEAKKLGQYSGNVILIVNVASYCGNTAQYKDLQKLHDKYSKKGLRILAFPCNDFGNQEPDSLTEIKNFCSTKYGVEFEIMEKVHAKGNTSEPYTTLNNVEPKGDVEWNFEKFLIGKDSNVIARFKPGIQPFDENLIAAIEVAIDS

SEQ ID NO: 29930 - protein, 643 aa, Treponema denticola ATCC 35405
MKGFDYPFSLLVGQKKLVRALLVLAVSDKINSLLIAGWKGTGKTIAARSLKNISDMSIVNIPLNITEDNLFGGLDIKASLESGKIKFQHGILDGAENKILYIDEINLFPNEYINTILNVIETGFLQTERDGHSNKKIIESKLIGTMNPEEGFLNNSITDKFSIYVETDSNLNKEERLKILKRNLSLDKEDKITIEALKKEDKILSNKIHDAKKRVNGIKISDSIITKAEALSKEANCLGYRASTYLIHTARALAAIDNHQYITDENFQEAAELVLKHRKNILSETQNKNQIKSDKDNNDKTKSDKNKTAEKPNEKDNQKIESKSRISNNENDATEHNGNNTNNQNGISYKNSDTELADKIFKIKNLLSINEDNSFRKGMGKRNKTRTNELKGKSFGYTRSSQNLHNLAIIPTIKSAALHQIKPKKGIIKINKDDYKFKRRKTRIGASIIFLVDASGSMGAMKRMKETKNTILSLLMDSYQKHDEVSMITFAGTRVEIILPFTRSVLLAKRELQLIPTIGKTPLALGLNKALEYFKIHRLKNKDMIPLLFLITDGRTNHGSVFFDEPIKDALFISKKIKNANIYSVVIDTESGFVKLALAEEVAKNLNARYYQIEDLKPELLTEIVHQNTEYSLSRIDVMEDKR

SEQ ID NO: 29931 - protein, 309 aa, Treponema denticola ATCC 35405
MTEKQIFPFVQIEGQEDIKLAIILNLICPAISGVLIRGEKGTGKSTIVRGIGELMQRQGENLKVIELPINATEDRVAGSIDIERVLKTGEKVLQKGILAEADGNILYADEINLLEDYIVDLLLDAAAMGVNTIERDGISYSHSSKFILIGTMNPEEGELRPQLLDRFGLLVDVKSEKDGHLRKEIIKKRLAFENDPVEFINASHKEEKKLISKIKKAQKRLPLIKTTDEILDLVVSLSIGLNVDGHRGDLTLVRAAKAYAAFQERDEVTKDDIIRLAQMVYSHRLRKKPFEEINPLNQADIENILNERL

SEQ ID NO: 29932 - protein, 493 aa, Geobacillus kaustophilus HTA426
MKIQNYINGEWKEPSTGQFAPVINPATGETIAEVAMSGPNDIDEAVQAAKEAQKQWALVPAPKRAEILYKVGMLLKERKEQLARMLTMEMGKVIEEARGEVQEGIDMAFYMAGEGRRLFGDTTPSELKDKFAMSVRVPVGVVGIITPWNFPIAIATWKSFPAIVAGNAVVWKPAPETPIMAQELARIFEEAGLPPGVFHVVHGDGPTVGNALVEHPDVKVISFTGSNEVGRMIAEKCGRLLKKVSLEMGGKNAVIVMDDADLTLAVDGIIWSAFGTSGQRCTACSRVIVHERVKQELERRLLEAVKTLKIGNGLDETVKVGPVIHEEALQKIDRYVRIGVEEGAKLLVGGYILREGDYARGFYYAPTIFTDVTPNMRIAREEIFGPVVSIISVRSLDEAIAVNNSVDYGLSSAIFTRDVNNVFRAMRDLDTGIVYVNAGTTGAEIHLPFGGTKGTGNGHRDSGVAALDVFTEWRSIYVDFSGKLQRAQIDTDD

SEQ ID NO: 29933 - protein, 430 aa, Robiginitalea biformata HTCC2501
MVIKEPKSKKPVKQGMLDNVMRQFDHAADLLELNPNIRKILEVTNNELLVHFPVRMDDGTVKIFTGYRVQHNNALGPYKGGLRYHPTVDIDAAKALAMWMTWKTSLAGLPFGGAKGGIQLDPSRYSQEELQRITRRFTFALGDNIGPELDIPAPDVNTTAQTMAWILDTYMSTKSPAERSTNLHVVTGKPIGAGGSAGRDRATGYGVYLTIKFWAETRGHTLHGKTFAVQGFGNVGYWASHFLEEEGGVLIGVQDASGTLYRAEGIDVGELAEYARANRGRIHGFSKASPIDSGDFFGLDCDILIPAALGNQITAKNAPDIKASLIAEGANGPTDVSAEAILLEKQVDIIPDILCNSGGVIGSYFEWLQNKNSEIWPMEEVMDRLEKKMRESFNRVTAEAEERQVDWRSAAFIIAIERLADAYTQRGIFP

SEQ ID NO: 29934 - protein, 86 aa, Brassica napus
  misc_feature (19)..(19): Xaa can be any naturally occurring amino acid
  misc_feature (30)..(30): Xaa can be any naturally occurring amino acid
WYFYSMVQLAEWVDYIPFXAAADRFAVKIXLLTSFRHTCFIEIMPRDQAPKRELWLSFWSEVHYTSLYDNQAVPVQQKPNPPPWLF

SEQ ID NO: 29935 - protein, 646 aa, Oryza sativa
MAKSNASRASATRRKFYFLQKSLLVSSLLAVVAADVVGAGPNQQCFPSSCGDLGNISYPFRLASDSRPCVGTLRPWYNLSCSSGRATIQINTRTYYVTSINYTGEIFSVVDATLQDDDTNGTSCPLPRSDHLPYIDYWPPYLGESSTDSYGFVYLATASDTWACFVNCSRARTDTMPWYRPVTCLLPNNSFVFVSFDDCAVGELQPSCRYLAMIPVDRWNLPDNSSQLQNASYTDIIGFIRKGFSVRFPYRPDQYQSPRMSARECLKDSNRLVLGSLVVFIFLAHKYWKTRITIDAVEKFLRMQQMIGPTRFAYTDIIAITSHFRDKLGQGGYGSVYKGVLLPGNVHIAVKMLTGSSSCNGDEFISEVSTIGRIHHVNVVRLVGFCSEEMRRALVYEYMPRGSLDKYIFSSEKSFSWDKLNEIALGIARGINYLHQGCEMQILHFDIKPHNILLDDNFVPKVADFGLAKLYPRDKSFVPVSAARGTVGYIAPEMISRSFGVISSKSDVYSFGMLLLEMAGGRRNADPNAANSSQAYYPSRVYRELTRRETSEISDIADMHELEKKLCIVGLWCIQMRSCDRPTMSEVIEMLEGGSDELQVPPRPFFCDDEQFPGVESYNMPSDLTAISEEHEDDDDESICLFESYQ

SEQ ID NO: 29936 - protein, 539 aa, Prochlorococcus marinus str. NATL2A
MAKDPGRVLIFDTTLRDGEQSPGASLNLEEKLAIAQQLARLGVDVIEAGFPFASPGDFAAVQKIAENVGGEEGPIICGLSRASKPDIKACANAIAPAPKKRIHTFIATSDIHLEHKLRKSRKEVLDIVPDMVGYAKSFVDDVEFSCEDAARSDLDFLYEVIELAISSGANTINIPDTVGYITPSEFGDLILNINKNVPNINEAVLSVHGHNDLGLAVANFLEAVKNGARQLECTINGIGERAGNAALEELIMALHVRRSYFNPFFGRPPESPTPLTAVRTEEITKSSRLVSNLTGMVVQPNKAIVGANAFAHESGIHQDGVLKNRLTYEIIDAKTVGLSDNKISLGKLSGRSAVRARLEDLGYDLNREDLNDAFARFKDLADRKREITDRDLEAIVSEQVQLPEALFQLKLVQVSCGTSLMPTATVTVVGEDGEEKTAVSLGTGPVDAVVRALDSLTEEPNELIEFSVKSVTEGIDALGEVTIRIRRDGNLFSGHSADTDVVVAAAQAYINALNRLVAAHGRKSIHPQHDLAKVEKKGI

SEQ ID NO: 29937 - protein, 339 aa, Klebsiella pneumoniae
MTIKTYREAVKEALAQEMERDERVVLIGEDLRGGHGGNAPEEAKIEAFGGVLGVTKGLWTQFGSDRVIDTPITESAIIGMAAGAAATGLRPVAELMFMDFFGVSHDALYNQAAKFRYMFGGKARAPLVMRGMIGAGFSAAAQHSQSPYNIFATTPGLKVVVPSTPYDVKGLLIQSIRDDDPVVFCEHKMLYDLKGEVPDEIYTIPLGVANYTREGEDVTIIALSAMVHKANQVADKLAREGISVEVVDPRTISPLDEEGILESVASTGRVVIVDESAARFGFAHDVAALIASQAFHFLKAPVLLVTPPHTPVPFSPALEKLWIPGVERIEAAVRQVLED

SEQ ID NO: 29938 - protein, 300 aa, Bacillus subtilis subsp. subtilis str. 168
MSVFINKDTRVIVQGITGSTALFHTKQMLEYGTNIVGGVTPGKGGTEAEGVPVFNTVAEAVQTTGANASVIYVPAPFAADAIMEAVDAELDLVICITEHIPVLDMVKVKRFMEGKKTRLIGPNCPGVITPEECKIGIMPGYIHKKGHVGVVSRSGTLTYEAVHQLSEAGVGQSTAVGIGGDPVNGTNFIDVLKAFNEDPDTHAVIMIGEIGGTAEEEAAEWVKANMTKPVVGFIGGKTAPPGKRMGHAGAIISGGKGTADEKIKTLNACGIEVAETPSVMGETLIKVLKEKNLFETCKTH

SEQ ID NO: 29939 - protein, 224 aa, Cryptococcus neoformans var. neoformans JEC21
MSKAIISPSVLASDLSDLSNECRRMMANGCDWLHMDVMDGHFVPNITMGAPILEHVYKNVPNIFMDCHMMVSNPSQWVPEVAKAGGKLYTFHYEATEEPEKVIELVHSHNMLAGLAISPETPASAITDSLGKAADLLLVMTVRPGRGGQRFMPECLEKVKELRERFPGKNIQVDGGVGSGNACQCAQAGSNVLVAGTAIFGAKDPKQTIQEMRTAVDGAIAQQK

SEQ ID NO: 29940 - protein, 491 aa, Silicibacter sp. TM1040
MSLSALSARAEISDKALVRSFSYINGKWCASSNGEVVAVHDPATGDFIGDVTAMTAEDSSAAVDAAHAAFTSWALMLPQDRCALLRRWFELMIEHKEDLARLMVLEQGKPLSEARGEIDYGAAFVEFYAEESKRPNIEGVTSHLPDAEVELWREPVGVAALITPWNFPSAMLTRKAAAALAAGCTVVAHPSAETPFSALALAELAERAGIPKGVFNVITGKAPVVVEPWTRDARVRALSFTGSTEVGKLLYRQSAETVKRLVMELGGHAPVIVFKNCDLDRAVAETIKAKFATSGQDCLGANRIFVERDIYDEFCTRFVAATQALSVGKGIDDPDIGPLMNEKAVQKQEEHVADALEKGATLACGGKRHALGPLFYEPTVLTDVPADALILHEETFGPVAPITPFDSEDEVIQRANDSEYGLVAYVHSHDPRRIYRLSRALQFGMVAVNRTKVTGAPIPFGGTKQSGMGREGARLGMEEFTEVKYVCRDWA

SEQ ID NO: 29941 - protein, 289 aa, Salmonella enterica subsp. enterica serovar Paratyphi A str.
MSVLINKDTRVICQGFTGSQGTFHSEQAIAYGTQMVGGVTPGKGGTTHLGLPVFNTVREAVEATGATASVIYVPAPFCKDSILEAIDAGIKLIITITEGIPTLDMLTVKVKLDEAGVRMIGPNCPGVITPGECKIGIMPGHIHKPGKVGIVSRSGTLTYEAVKQTTDYGFGQSTCVGIGGDPIPGSNFIDILKLFQEDPQTEAIVMIGEIGGSAEEEAAAYIKDHVTKPVVGYIAGVTAPKGKRMGHAGAIIAGGEGTADEKFAALEAAGVKTVRSLADIGEALKAIIK

SEQ ID NO: 29942 - protein, 108 aa, Crocosphaera watsonii WH 8501
MSSVLEITDPQFDAEVFETQTPVLVYFWASWCGPCRLVSPSVSKIADSYSDSLKVVKLEVDPNPNARTKCKVEGVPALRLYKNKELLAKHEGAITRPQLEEMLNKHLK

SEQ ID NO: 29943 - protein, 413 aa, Triticum aestivum
MAAAAGGATTSTRRGPGGGGRPMDDENLTFETSAGVEVVGSFDAMGIREDLLRGIYGYGFEKPSAIQQRAVIPIITGRDVIAQAQSGTGKTSMISLSVCQVIETNVHEVQALILSPTRELATQTERVMQAVGNFMSVSVHACVGGKSIGEDIRKLESGVHVVSGTPGRVCDMIKRRTLRTRAIKLLVLDEADEMLSRGFKDQIYDVYRYLPPELQVVLISATLPHDILEITSKFMTDPVRILVKRDELTLEGIKQFFVAVEKEEWKFDTLCDLYDTLTITQAVIFCNTKRKVDWLTERMRTNNFTVSAMHGDMPQKERDAIMSEFRGGTTRVLITTDVWARGLDVQQVSLVINYDLPNNRELYIHRIGRSGRFGRKGVAINFVRKDDIRILRDIEQYYSTQIDEMPMNVADLI

SEQ ID NO: 29944 - protein, 547 aa, Listeria innocua
MTLKSGFDYMNNPLLNKGTAFTSEERLNYKLDGLLPPIIETIEQQALRIENQLENLESPLHKHQFLTNLYNENRTLYYYVVTKNVSEYLPIIYTPTIGDAVIHYHTDYTAPDEALFIDAFTPEKLRASVENYAQNNPNIDMIVITDGEGVLGIGDWGVNGVKIAVGKLAVYTVAAGLSPDRVLPVVIDAGTNNKTLLEDSRYLGNKRPRLSESDYDTFIAQFVEVMSDVFPSAILHWEDFGRANASRILHNYRDKICTFNDDIQGTGAMVVAAALATINVSNIPLNKQKIIIFGAGTAGIGIADQLSGQLMRETGLPFESAKKHFYLLDRSGLVLDNMTDLTDGQKKYAHQASDWASVPTDTLEHLVEAIHPTMLIGCSGVTGAFKESIVKKMTEHTERPAILPLSNPTKLAEATAADLIKWTDGKALIVTGSPSKPVTYQNITYEIGQANNALLYPGLGLGALVTRSKFITDGMLAAASSAVSDQISTNELGAALLPHVRTLRETSRAVAIAVANQAIKENIHQVELASVTKAVEREMWQPTYKGV

SEQ ID NO: 29945 - protein, 114 aa, Musa acuminata
MKVAPAGILLVLAFALVVVEPTRAFTCIQVEACLTPCLTYLTGQQPAPTPACCDGVRRLENMGITPAERQFACNCVKHAAAHFPNLKDDAVSDLPRLCATPLPFPISLEFDCSK

SEQ ID NO: 29946 - protein, 278 aa, Zea mays
  misc_feature (253)..(254): Xaa can be any naturally occurring amino acid
  misc_feature (257)..(257): Xaa can be any naturally occurring amino acid
  misc_feature (263)..(263): Xaa can be any naturally occurring amino acid
MAQAWAFLLPVLVLGSYVTSLFFPSYISNPLCGGDGGRSLFLCAQAPKDQDPSPAVSTMYKTAFHFQPAKNWMNDPSGPMYFNGIYHEFYQYNLNGPIFGDIVWGHSVSTDLVNWIGLEPALVRDTPSDIDGCWTGSVTILPGGKPIIIYTGGDIDQHQAQNIAFPKNRSDPYLREWIKAPNNPVLRPDEPGMNSIEFRDPTTGWIGPDGLWRMAVGGELNGYSAALLYKSEDFLNWTKVDHPLYSHNGSIMXXCPXFLCGIXGQYAGLDLSAAIPQA

SEQ ID NO: 29947 - protein, 445 aa, Synechococcus sp. RS9917
MIIGGSDAGISAAIRIRELDTNAEVSVLLRDAYPNYSICGLPFLISGQTAMPEQLAHRSLSELERLGLQIQAHTTAVAVDASRQTVETHKGHRIPYDRLILATGARARRPQLAGVDEEGVFSLRWMGDALRLQSFLLEQQPRHAVIVGGGYIGLEMADALHRRGLQLAVVEHNTALLRTVHASLASSLQQALLQRGHSLHLNQRLRAIHRQGRALAAELSDGSMIHTEMVLLAVGAVPATELAASAGIALGAGGAMVVDRQMRTGVDQIWAAGDGVETYHRLLQRHGYQPLGTNAHKQGRIAGENALGGSRHYAGTLGSQVVQVFDQVVARTGLRSSEAEAAGWQARSAAFKCWSHKAYVPGAGSLHFRITGDDRSGRLLGAQMVGPAGAEVAKRLDTFAQALFHELTIEAISDLDLCYTPPLSSPWDPVQMAAQHWCLQRNAAA

SEQ ID NO: 29948 - protein, 153 aa, Triticum aestivum
HASVEFQGQHDNPANRVDEYGNPFPLAGGVGGGHAAPGTGGQLQARRGEHKTGGILHRSGSSSSTSSSEDDGMGGRRKKGMKEKIKEKLPGGHKDNQQHMATGTGTGGAYGPGTGTGGAYGQQGHAGMAGAGTGTGEKKGIMDKIKEKLPGQH

SEQ ID NO: 29949 - protein, 322 aa, Rubrivivax gelatinosus
MVTRRDAHDGPAEGSDTFEPGASPEVPEAAEAPAQVPADGEGEHGNTLQSYLRDIRRAPLMSAEEEHATAVRARAGDFAARQAMIERNLRLVVSIAKHYVGRGMPMIDLIEEGNLGLMHATGKFEPERGFRFSTYASWWIRQSIERAIMHQARLIRLPVHVVRELNQVLKARRALESARRGEAERPVSVDEVAAALQRPVEEVAELLKLAEQPTSLDMPLERESGESMLDTVADEDAIDPLGLTLSREAVHLLDNGLAELNEREREVLAGRFGLRDREPETLEELAARLGLTRERIRQIQQEALLKLKRRMVRRGVDRDALF

SEQ ID NO: 29950 - protein, 156 aa, Francisella tularensis subsp. tularensis SCHU S4
MSIYDFKLTANDGSEYHLPKNKVLLIVNVASKCGFTKQYRGLQHLHKIYPDLEIVAFPCNSFGGQEPGSDEEIKNFCETNYNVTFPIMKKTKVNGKDAEPLFEYLKERAKGVLGTEAIKWNFTKFLVSKDGETIVRYAPKTIPEDLIPDIDNFLKD

SEQ ID NO: 29951 - protein, 314 aa, Haemophilus somnus 2336
  misc_feature (278)..(278): Xaa can be any naturally occurring amino acid
MKQQKALGAGADHNVGRKASEDDQDAIRAMLEGADMVFIAAGMGGGTGTGAAPIVAQIAKELGILTVAVVTKPFSFEGKKRMHFAELGIKELSKHVDSLIIIPNEKLLKVLGKNISLINAFAAANDILRNAVTGISDMITSPGLINVDFADVRTVMSEMGRAMMGSGVVQGTAADGRAEKAAQEAVASPLLEDVDLSGARGVLVNVTAGFDLTLDEFSTVGETIRSFASEEATVVVGTTLVPEMSDEIRVTIVATGIGDIERQDVQIMSTSPLNEPVXPVEQQHIRPEPRHDLDTPITERLKAFRPVDPTLFLS

SEQ ID NO: 29952 - protein, 323 aa, Arabidopsis thaliana
MGVDYYKVLQVDRNAKDDDLKKAYRKLAMKWHPDKNPNNKKDAEAKFKQISEAYDVLSDPQKRAIYDQYGEEGLTSQAPPPGAGGGFSDGGASFRFNGRSADDIFSEFFGFTRPFGDSRGAGPSNGFRFAEDVFSSNVVPPRKAAPIERQLPCSLEDLYKGVSKKMKISRDVLDSSGRPTTVEEILTIEIKPGWKKGTKITFPEKGNEQRGIIPSDLVFIVDEKPHAVFKRDGNDLVMTQKIPLVEALTGYTAQVSTLDGRSVTVPINNVISPSYEEVVKGEGMPIPKDPSKKGNLRIKFTVKFPSRLTTEQKSGIKRMFSSS

SEQ ID NO: 29953 - protein, 161 aa, Pseudomonas aeruginosa UCBPP-PA14
MSDSLLSIPCTTIKGEQKTLADFGGKALLVVNTASKCGFTPQYQGLEALWEKYRERGLVVLGFPCNQFGKQEPGDEGEISQFCELNYGVSFPLFRKIEVNGAGAHPLFVSLKKRALGLLGSQGIKWNFTKFLIGRDGQVVKRYAPTTKPEELSSAIEALLE

SEQ ID NO: 29954 - protein, 294 aa, Corynebacterium diphtheriae
MTLKIGTRGSLLATTQSGHVRDDLRPYEAELVIVTTHGDVNMAPVERIGVGVFTQALREELHTGGCDIAVHSFKDLPTELDPRFHLVVPKRADFRDCLIARDGLSLADLPAGALIGTGAPRRISQIKALRPDVECVPLRGNIDTRMGKVTSGELDAVVLAYAGLTRVGRGDEATQVFDPQDFLPAPAQGALAVECRADDAYAREAIDSICDEQAQVCAVTERVVLNRLEAGCTAPVAAHATLNDGTLTLTAAVIALDGSKVVRRELSAPVAENVALAEELTRALIADGAATILG

SEQ ID NO: 29955 - protein, 658 aa, Oryza sativa
  misc_feature (229)..(229): Xaa can be any naturally occurring amino acid
MDFTNLLITVLLLLSPLKYESDVATASDDEDFFKTCSSQRCSKHGPEIRYPFRLSTQPPSCGAPGMQLSCSGQDTILDHPVLGSCKVTMIYYRHVIMNAIPLVDSLPHCPLQKLVSVNQSTAVYKPHTSEVASVVGCSRDSIDTNQYGIVGPTSCPSLANNASQFWYLAYPYDNMSILPLGCTIVSKDIPMPYSYDKNGPNFDISIFTETAKRVISTGETVFTWYTSNXVTSICQQCEREGRRCGFSSQRESSILPASYVNRVETRTYPSYTTLVRKLCTCIFPAMLCKIIESGPRVTIIAATSSVGTFIVLSLIVATALYISLKSRYNEEIHLKVEMFLKTYGTSKPTRYTFSEVKKIARRFKDKLGHGAFGTVYKGELPNGVPVAVKMLENSVGEGQEFINEVATIGRIHHANIVRLLGFCSEGTRRALIYELMPNESLEKYIFPHGSNISRELLVPDKMLDIALGIARGMEYLHQGCNQRILHFDIKPHNILLDYSFNPKISDFGLAKLCARDQSIVTLTAARGTMGYIAPELYSRNFGAISYKSDVYSFGMLVLEMVSGRRNTDPPAENQNEFYFPEWVFERVMNGQDLVLTMETTQGEKEMVRQLAIVALWCIQWNPKDRPSMTKVVNMLTGRLQNLQVPPKPFISSQNQLVI

SEQ ID NO: 29956 - protein, 404 aa, Mycoplasma pneumoniae
MAREKFDRSKPQLNVGTIGHIDHGKTTLTAAICTVLAKEGKSAATRYDQIDKAPEEKARGITINIAHVEYSSDKRHYAHVDCPGHADYIKNMITGAAQMDGAILVVSATDSVMPQTREHILVARQVGVPRMVVFLFKCDIATDEEVQELVAEEVRDLLTSYGFDGKNTPIIYGSALKALEGDPKWEAKIHDLMNAVDDGFQLLNVKWTNPFLLAIEDTMTITGRGTVVTGRVERGELKVGQEIEIVGLRPIRKAVVTGIEMFKKVLDSAMAGDNAGVLLRGVDRKEVERGQVLAKPGSIKPHKKFKAEIYALKKEEGGRHTGFLNGYRPQFYFRTTDVTGSISLPENTEMVLPGDNTSISVELIAPIACEKGSKFSIREGGRTVGAGSVTKCLNSESRILSWLC

SEQ ID NO: 29957 - protein, 357 aa, Synechocystis sp. PCC 6803
MTATLAAPSKTRRVVFPFTAIVGQDEMKLALLLNVIDPKIGGVMIMGDRGTGKSTTIRALADLLPEIEVVANDPFNSSPSDPEMMSEEVRIRVDSQEPLSIVKKKVTMVDLPLGATEDRVCGTIDIEKALSEGVKAFEPGLLAKANRGILYVDEVNLLDDHLVDVLLDSTAGGWNTVEREGISIRHPARFVLVGSGNPEEGELRPQLLDRFGMHAEIRTVREPELRVKIVEQRTEFDQNPHPFCDQYQTEQEALQAKIVNAQNLLPQVTIDYDYRVKVSEVCAELDVDGLRGDIVTNRAAKPWPLLEGRTEVTVDDISRVIVLCLRHRLRKDPLESIDSGSKVEKVFKRVFGVVDEA

SEQ ID NO: 29958 - protein, 258 aa, Frankia sp. CcI3
MSVVRLEVDGGIGTIRLDRPPMNALDSTVAAELRTAAVEATRRSDVRAVVLYGGEKVFAAGADIRQMAPMGYAEVSTWVGDLNSTFEVVARIPKPVVAAVTGYALGGGLELALCADVRVLAEDARVGQPEILLGVIPGAGGTQRLPRLIGPSRAKDLIFSGRQVRAAEAAEIGLADAVVPAGEVYVQAKRIAGRYTNGPAMALAAAKQAVDDGAEIALAEALRLEAALFAGLFATEDRRIGMESFLESGPGKADFIGR

SEQ ID NO: 29959 - protein, 321 aa, Spirogyra sp. SAG 170.80
KIGINGFGRIGRNFLRCWYEREDSPIEVIAVNDSGGVKNAAHLLKYDSMLGTFKADVKIVDDKTISVGGKNILVVSSRDPLQLPWAELGIDIVIEGTGVFIDTPGAGKHLTAGAKKVIITAPAKGNEIPTYVCGVNADEYSHEAANIISNASCTTNCLAPFVKVLDEEFGIVKGTMTTTHSYTGDQRLLDASHRDLRRARAAALNIVPTSTGAAKAVALVLPNLKGKLNGIALRVPTPNVSVVDLVINTEKKGMTAEEVNAAFRKAADGPMKGILGVCDLPLVSIDFRCSDVSSTIDSSLTMVMGDDMVKVVAWYDNELGY

SEQ ID NO: 29960 - protein, 107 aa, Prochlorococcus marinus str. NATL2A
MSTASAVTDSSFEQEVLQSDVPVLVDFWAPWCGPCRMVAPIVEEISKDFEGKIKVYKLNTDENPNVASQYGIRSIPTLMIFKGGQKVDTVVGAVPKATLSGTISKHL

SEQ ID NO: 29961 - protein, 528 aa, Arabidopsis thaliana
MGNCCRSPAAVAREDVKSNYSGHDHARKDAAGGKKSAPIRVLSDVPKENIEDRYLLDRELGRGEFGVTYLCIERSSRDLLACKSISKRKLRTAVDIEDVKREVAIMKHLPKSSSIVTLKEACEDDNAVHLVMELCEGGELFDRIVARGHYTERAAAGVTKTIVEVVQLCHKHGVIHRDLKPENFLFANKKENSPLKAIDFGLSIFFKPGEKFSEIVGSPYYMAPEVLKRNYGPEIDIWSAGVILYILLCGVPPFWAESEQGVAQAILRGVIDFKREPWPNISETAKNLVRQMLEPDPKRRLTAKQVLEHPWIQNAKKAPNVPLGDVVKSRLKQFSVMNRFKRKALRVIAEFLSTEEVEDIKVMFNKMDTDNDGIVSIEELKAGLRDFSTQLAESEVQMLIEAVDTKGKGTLDYGEFVAVSLHLQKVANDEHLRKAFSYFDKDGNGYILPQELCDALKEDGGDDCVDVANDIFQEVDTDKDGRISYEEFAAMMKTGTDWRKASRHYSRGRFNSLSIKLMKDGSLNLGNE

SEQ ID NO: 29962 - protein, 554 aa, Bacillus anthracis str. 'Ames Ancestor'
MSRKIVVVGGVAGGASVAARLRRLSEEDEIIMVERGEYISFANCGLPYYIGGVITERQKLLVQTVERMSKRFNLDIRVLSEVVKINKEEKTITIKNVTTNETYNEAYDVLILSPGAKPIVPSIPGIEEAKALFTLRNVPDTDRIKAYIDEKKPRHATVIGGGFIGVEMVENLRERGIEVTLVEMANQVMPPIDYEMAAYVHEHMKNHDVELVFEDGVDALEENGAVVRLKSGSVIQTDMLILAIGVQPESSLAKGAGLALGVRGTIKVNEKFQTSDPHIYAIGDAIEVKDFVTETETMIPLAWPANRQGRMLADIIHGHTDSLYKGTLGTSVAKVFDLTVATTGLNEKILKRLNIPYEVVHVQANSHAGYYPNATPVLIKLIFNKDSGKIYGAQTLGRDGVDKRMDVIATAIKANLTVLDLPDLELSYAPPYSSAKDPVNMVGYAASNIVDGFVDTVQWHEIDRIVENGGYLIDVREPNELKQGMIKGSINIPLDELRDRLEEVPVDKDIYITCQLGMRGYVAARMLMEKGYKVKNVDGGFKLYGTVLPERIVY

SEQ ID NO: 29963 - protein, 395 aa, Treponema denticola ATCC 35405
MAKEKFNRTKVHMNVGTIGHVDHGKTTLSAAITTYCAKKYGDKLLKYDEIDNAPEEKERGITINTRHLEYQSDKRHYAHIDCPGHADYVKNMITGAAQMDGAILVVSAPDSVMPQTKEHLLLARQVGVPSIIVFLNKVDLVDDPELVELVEEEVRETLTSYGFPEDTPIIKGSAFKALQEGATAEDTACIEELLKTMDEYFKDPVRDSDKPFLLPIEDIFTIQGRGTVVTGRIERGVIKMNEEVEIVGIKPTKKTVVTGIEMFNKLLDEGEAGDNVGLLLRGIEKKEVERGQVLAKPGSIHPHTKFEAQIYVLSKEEGGRHSPFFSGYRPQFYFRTTDITGTVNLPEGTDMVKPGDNTKIIGELIHPIAMDQGLKLAIREGGRTIASGQVTNIIE

SEQ ID NO: 29964 - protein, 411 aa, Vitis vinifera
MNALAATNRNFRHASRILGLDSKLEKSLLIPFREIKVECTIPKDDGSLATYVGFRVQHDNARGPMKGGIRYHPEVDPDEVNALAQLMTWKTAVVDIPYGGAKGGIGCTPKDLSMSELERLTRVFTQKIHDLIGTHTDVPAPDMGTNAQTMAWILDEYSKFHGHSPAVVTGKPIALGGSLGREAATGRGVVFATEALLAQHGKSIKGLTFVIQGFGNVGSWVARLIGERGGKIIAVSDVTGAVKNQNGLDIVDLLRHKEETGCLTNFSGGDHMDPNELLTHECDVLIPCALGGVLNKENAADVKAKFIIEAANHPTDPEADEILSKKGVVILPDIYANAGGVTVSYFEWVQNIQGFMWEEEKVNNELQKYMTKAFHNIKAMCQSHNCSLRMGAFTLAVNRVACATTLRGWEA

SEQ ID NO: 29965 - protein, 498 aa, Photorhabdus luminescens subsp. laumondii TTO1
MSQSNVEISDDVQTWLSDHRYKEGFFTQVATDELAKGLSEDVVRAISAKRNEPEWMLEFRLEAYRHWLGMEEPHWLKANYPNLDYQDYSYYSAPSCGACSDSCNSQSGAVQGTGSEQANSYLTAEIEETFDKLGVPVREGEAVAVDAIFDSVSVSTTYRDKLAKEGIIFCSFSEAIQEYPGLVRKYLGSVVASHDNFFAALNAAVASDGTFVYVPKGVRCPMELSTYFRINAAKTGQFERTILIADEGSYVSYIEGCSAPVRDSYQLHAAVVEVIIHKDAEVKYSTVQNWFSGGDSAGGILNFVTKRALCEGENAKMSWTQSETGSAITWKYPSVILKGDNSIGEFFSVALTNGTQQADTGTKMIHIGRNTKSTIISKGISAGRSQNSYRGLVKILPGAENARNYTQCDSMLIGTECGAHTFPYVEVQNNTAQLEHEATTSRIGEDQLFYCLQRGISEDDAISMIVNGFCKDVFSELPLEFAVEAQKLLAISLEHSVG

SEQ ID NO: 29966 - protein, 362 aa, Prochlorococcus marinus str. NATL2A
MSSTRKRRVFPFTSVIGQEEMKLALLLNVIDPRIGGVMIMGDRGTGKSTTIRALADLLPAIEVVEGDPYNSSLEDPDLQSNDVRERIDSGSDIQKGEKQVPMIDLPLGATEDRLCGTIDIEKALSEGVRAFEPGLLAKANRGLLYVDEVNLLDDHLVDVLLDSAASGWNTVEREGISVRHPARFVLIGSGNPEEGELRPQLLDRFGMSVEVRTVREAKLRVQVVDQRTAFDNDPESFSDSVQEKQESLQQKVVDAQNILNEVFIEEDLRLRISAVCGELDVDGLRGDIVTNRAARALAAFEGRKEVTEEDIARVVSTALRHRLRKDPLEQVDSGDRVIKAFCKVFERNESDDVSEFELATAN

SEQ ID NO: 29967 - protein, 130 aa, Oryza sativa
  misc_feature (52)..(52): Xaa can be any naturally occurring amino acid
  misc_feature (102)..(102): Xaa can be any naturally occurring amino acid
MARSMITSPLVAPARAKGLPSISRRGSSFAIVCSGGKKIKTDKPYGIGGGMXVDIDASGRKSTGKGVYQFVDKYGANVDGYSPIYSPEEWSPTGDTYVGGTXGVLIWAVTLAGVLGGGALLVYNTRALAG

SEQ ID NO: 29968 - protein, 349 aa, Ashbya gossypii ATCC 10895
MVKETKLYDLLGVSPSASDAELKKGYRKAALKYHPDKPTGDTEKFKEISEAFEILSDPNKREVYDTYGLEAARGNAPSGFGGAGPGGAGFGGFSTGGGGRHAFSQEDAFNIFSQFFGNSAGGASSPFGFSSAGGDEFGFGGFPGGAGLHTSSGGMPGGFGGMPGSSGMHSHSQPEEKLVQVNLPVSLEDLFVGKRKSFKITRKGQTGIPEKKQIDIQLRPGWKAGTKITYKNEGDYNPSTGGRQTIQFIIQEKPHEFFKRDGNDLIYTLPLTFKESLLGFDKTVRTIDGRQISIHKTQPVQPSEEMRYPGQGMPLSKNPSERGDLIVKYKTDYPITLTEKQRRAILENF

SEQ ID NO: 29969 - protein, 520 aa, Pseudomonas syringae pv. phaseolicola 1448A
MLDANLKAQLKSYLERVTRPIEIVASLDDGAKSQEMLALLNDVISVSKDVTLNDSGNDARTPSFSLSSPGHDISLRFAGIPMGHEFTSLVLALLQVGGYPPKVSAETIEQVRALQGEFHFETYFSQSCQNCPDVVQALNLMAVLNPGIKHVAIDGALFQDEVTDRKIMSVPSIYLNGELFGQGRMGLEEILAKIDTGAGARQAEKLNAKQAFDVLVVGGGPAGSAAAVYAARKGIRTGVAAERFGGQVLDTMAIENFISVQHTEGPKLAVALEEHVKQYEVDIMNLQRADKLIPGAAGELHEVKFASGASLKAKTVILATGARWREMNVPGEQQYRNKGVAYCPHCDGPLFKGKRVAVIGGGNSGVEAAIDLAGIVSHVTLLEFDVQLRADAVLQRKLHSLPNVTVITSAQTTEVTGDEQKVNGLRYKNRTTGEEITVPLEGIFVQIGLLPNSEWLKGSIELSPRGEIVVDARGETSVPGIFAAGDVTVTPYKQIIIALGEGAKASLSAFDHLIRTSAPA

SEQ ID NO: 29970 - protein, 568 aa, Glycine max
MASSTLICDTQQWKELKAHAEDVEKTHLRDLLSDDERSQSMVVEFDGILLDYSRQQATLETREKLFKLAEVTSLKQKINQMYNGEYINSTENRSVLHVALRAPRDAVIQSDGNNVVPDVWNVLDKIQEFSERVRSGSWVGATGKELKDVVAVGIGGSFLGPLFVHTALQTDPEAIESARGRQLRFLANVDPIDVARNITGLNPETTLVVIVSKTFTTAETMLNARTLREWISNALGPLAVAKHMVAVSTNLTLVEEFGIDPNNVFAFWDWVGGRYSVCSAVGVLPLSLQYGFSVIEKFLKGASSIDQHMYSEPFERNLPVLLGMLSVWNVSFLGYPARAILPYSQALEKFAPHIQQVSMESNGKGVSIDGVPLPFEAGEIDFGEPGTNGQHSFYQLIHQGRVIPCDFIGVVKSQQPVYLSGEVVSNHDELMSNFFAQPDALAYGKTAEQLQKENVPPHLVPHKTFSGNRPSLSLLLPSLNAYNIGQLLAIYEHRVAVEGFIWGINSFDQWGVELGKSLASQVRKQLNASRTKGEPVQGFNFSTTAMLTRYLQASADVPADLPTRLPQI

SEQ ID NO: 29971 - protein, 427 aa, Xanthobacter autotrophicus Py2
MTQAHLDKFGRPIVVVTGIGIVTSLGQGKEDNWRRLTAGESGIHTITRFPIEGMRTTIAGTVDFLFDGRVAAPNLSEKLATLAAEEAIAEAAIGSDGDFPGPLFAAVPPVELEWPERRQLADAVGHYPIVYHDLLGAAASGKFRPWHERFLFGSVADRLADRFGTRGQPISLSTACASGATAIQLGVEAIRRGETDVALSLGTDGSVHPEALIRFSLLSALTTANDNPEGAARPFAKNRDGFVMAEGAAALVLESYEHAVARGAKILGVLEGCGEMADNFHRTRSSPDGRPIIGCMTNAFADAGVTPDDVDYINAHGTSTPENDRMEYVGMKAVFGDEKLAQTPISSNKSMIGHTLTAAGAIEAAVSLLTIANGRIPPTINYNIPDPAIPLDVVPNVARDAKVRRVISNSFGFGGQNVCLVLAGEPA

SEQ ID NO: 29972 - protein, 370 aa, Saccharophagus degradans 2-40
MELNTTEEIIDEIRQGRMVILMDDEDRENEGDLIMAAEQVRPEDINFMATHARGLICLTLSEERCKQLDLPLMVRDNHAAHSTNFTVSIEAAEGVTTGISAADRARTIRAAVKRDALPRDLVQPGHIFPLMSQPGGVLSRAGHTEAGCDLARLGGYEPAAVIVEIMNEDGSMARREDLEKFAKLHNIKIGTIADLIQYRAINEKTVTCINERTVHTNHGEFILKTYLDKARKECHFALLKGEVRPDEPTLVRVHVGNTARDVLGVQRTDMDNLSWSFQDAMKRVAEEGNGVLVLICHNETTEEIEESIDWMLSGKKARPRQDVAYKQVGTGSQILKDLGVSKMRLLSAPFKFKAISGFNLEVVEYLKNDA

SEQ ID NO: 29973 - protein, 701 aa, Magnetococcus sp. MC-1
MEMERDILNQKVLICEYIDLNSRLENFVSAFNFHILVVDDTTANRYTMKAILGGLEHVVILEANSGEQALALTIEQQVDLILLDIQMPGMDGFETAHLLKMSASTRDIPIIFITAIYRSEHFYKQGYQVGAVDYLTKPVDENLLLNRILSYMRLLQREKSLQRTMAELQRKEHALQTAHDEIAETLRERTVALDRASDAIISADQQGHVIFWNHGAERIFGYPKQTILHTPLLRLIPDQLHETFLSHFSEVIASGEIKNSDSIYEFSGLRANGEVFPIEVSVSYWQGAERHFFSAVVRDISQRKQLETQLRHAQQISESANRAKSTFLATMSHEIRTPLNTILGMGQLLEETDLTEMQHWCVNILGNSGRALLTLINDILDLSKIEEGHLSLEHTPFDLHQLLQEVEELFTFSALAKGITLRGHFSESLPQWVMGDPTRLRQVLLNLLGNAIKFTKQGFVELSAQTMAEDEICFSVFDSGPGIAKERQQEIFLPFTQADSSTTRKYGGSGLGLTISRRLVKLMHGQIQLESRLGKGSRFYFSLNLPQAPTERIPPPSLPATTVVHSSPQRALTILVADDSDDNRILIEAFLKKSPYKLVMASNGLEALEEFKKQPFDLVLTDIQMPIMDGYEAIRQIRQWESSQKMTTRTPIIALTAHVMKEEAEQIEQAGGDLHLSKPIQKKRLLEVIQTLTHDNRLSVR

SEQ ID NO: 29974 - protein, 527 aa, Triticum aestivum
MALEAAFHYLQLAGVHGTSTPALLLTVLLLLIIRLAWVRTTTVSTRFGKQQQLPPSPPGKLPIIGHLHLLGSQTHISIRDLDAKHGRNGLLLLRIGAVPTLFVSSPSAAEAVLRTHDQIFASRPPSMAADIIRYGPTDIAFAPYGEYWRQARKLLTTHMLSAKVVHSFRHGRQEEVRLVINKIREAATRGTVVDMSDLLSGYTNDVVCRAVLGESHRKAGRNRLFSELTEINVSLLGGFSLENYIPPNMVMADVLLRLVSVKAQRLNKRWDDLFNEIIEEHLHPSKPSSGEQQAADFIDLLLSLKEEYGLTTDNIKAILVDMFEAGIETSYLTLEYGMAELMNNRHILKKLQEEVRSQGKKLDMITEEDLSSMAYLRATIKETLRMHPPAPFLLPHFSTADCKVDGYLIPANTRVLVNAWALGRDPSSWERPDDFWPERFLQDQAGDVDTQMRGKDLRFLPFGFGRRICPGMNFGFATMEVMLANLMYHFDWDVPNMMGTGAGVDMAESFGLTLRRKEKLQLVAQIP

SEQ ID NO: 29975 - protein, 124 aa, Legionella pneumophila str. Lens
MTEALFERLGGQNAVNTAVDIFYRKMLMDDRVNYFFDDVDMEQQILKQKGFLTMVFGGPNQYTGKSMREGHQHLLARGLNDSHVDIVIEHLGETLKELGANEEDIQKVAAIANSVRGDVLGRSS

SEQ ID NO: 29976 - protein, 161 aa, Methanosarcina acetivorans C2A
MNKLIIPLILLASVIFTAGCTESPESATSAQEISVVENMTSLEQINTSVQEGPVLIKVGAEWCGPCQQMKPILSDLAAEYTGKVTVMSADIDQSPEIAAYFGIAYIPDSFVVVGFENGEYVYMQEDGNVTTDRFQARVLGVRDKQVYEELLERAVLYYENK

SEQ ID NO: 29977 - protein, 157 aa, Brassica napus
  misc_feature (91)..(91): Xaa can be any naturally occurring amino acid
MAQGTEKEETEFKVLETLTTTTPTLCSNNCGVTANPATNNMCQKCFNASVAAAGVDSTSILKRSARSVNLRSTPARVGIRPWEIDPVKRDXQQTIKRCSGCRKKVGLTGFRCRCGDLFCAEHRYSDRHECSYDYKTAGREAIARENPVVKAAKTVKV

SEQ ID NO: 29978 - protein, 475 aa, Wolbachia endosymbiont strain TRS of Brugia malayi
MSTPITVAYGDGIGPEIMEAVLSMLREAEAKISIDVIEIGERVYNKEWSYGISPSGWESIERTKVLLKSPTTTSQGKGHKSLNVALRKSLGLYANIRPCTSYHPVIENKFDRFDIVVIRENEEDVYTGIEHRLTGNSYQCTKIITRSGSEKICRYAFNYAKRHNRKKVTCLTKDNIMKMTDGIFHTAFDSIAKEYPDIKAEHYIVDIGMARVATEPENFDVIVTENLYGDILSDIVAQTSGSVGLAGSSNIGSEYAMFEAVHGSAPNIAGKNIANPSGLLNAAVHMLIYIGQADVAKLVHDAWLKTLEDGIHTADLYKEKKSKQKVGTKEFAEAVIDNIGKKPGILPELIISNGVSSKISKIQGNCEQDYKVRKLVGSDITLAWDKSSNFNQIVKLFESSNPKVIAIYSKGLAIWPGDSKSLSDQVTCRFIANNEKKTITNIDVNNLLIKLERNSFDVVRMDKLYLYDEKEGFFS

SEQ ID NO: 29979 - protein, 182 aa, Arabidopsis thaliana
  misc_feature (116)..(116): Xaa can be any naturally occurring amino acid
  misc_feature (147)..(147): Xaa can be any naturally occurring amino acid
  misc_feature (153)..(153): Xaa can be any naturally occurring amino acid
MVASPAQATMVAPFNGLKSSAAFPATRKANNDITSITSNGGRVNCMQVWPPIGKKKFETLSYLPDLTDSELAKEVDYLIRNKWIPCVEFELEHGFVYREHGNSPGYYDGRYWTMWXKLPLFGCTDSAQVLKEVEECKKEYPMPSIRXIGFGNXRQVQWIRFIAKSTKFTGNSLCFGNPSPLC

SEQ ID NO: 29980 - protein, 486 aa, Mycobacterium sp. JLS
MISANLIINGREETSDRTIDVVSPADIRVLLGSVPDAAPGQVDEAVAAAAMAFPEWSSRPLEERQGALLAAAGTIHDMIEEYAPILSRENGKILEESHVDLEFASGICGYTAGISAEILADQQIRDTGGTTLIRRRPIGPVAAITPWNFPVVLAFMKLAPALVAGNTVVLKPAANSPLVLAEVIRALQQHFPPGVLNMVTGGDAVGEALVAHPRIRKIGFTGGIDTGRKVMAAAARDIKRVTLELGGNDPAILLDDVDLSPETMRQIVKGAFGTTGQVCFGLKRIYVPTRIHDRFVEAFSAAVDEIVVGPGDDPRVTMGPLNNAQQKNLVEKIVDDARSSGATVTTLGQRLDSAAWDHGHFMMPSVVTEADPRLAIVEEEQFGPVVPVLKYDELDDVIRLVNQSQYGLAASIWTSDEERAFLLGRRFDTGSVFINSHTFTSLDPRAPFGGAKASGLGREFSPASLDSYTELQTISRRIGPPGPPLS

SEQ ID NO: 29981 - protein, 484 aa, Burkholderia xenovorans LB400
MMETETDLRRHDLLIDGKRLPPGTGEYSVDIDPATEEPIALVAQGSAADVDAAVHAARAALKVWNAIRSAERGRILMRLAGLMRANLEELAALESLDAGKPIAAVMRQDIPAAIDTLEYYAGWCDKINGQVVPVRPDALTYTLREPVGVVAAIVPWNFPLMIGMWKIAPALACGCTLIVKPAEITPLSALRIGELALEAGVPPGVLNIVTGKGRVVGDALVAHPGVDKVTFTGSPSVGRGILQGAAGNFKRVTLELGGKSANLIFPDANLDNAVRAAAAGIFFNTGQVCSAGSRILAHRDVYDEVVERLAARARSIKVGDPSSRETSMGPLISAAQMKTVLGYVETGRAEGASLVTGGARVGERGFFVEPTVFADVEHEMRISQEEIFGPVVSVIRFDDEADAIRIANGTLYSLAAGVWSADIGRVHRVARDLRAGTVWINTYGYTDVRLPWGGSGDSGFGREHGDVAIENFTEPKAVWLAIDQ

SEQ ID NO: 29982 - protein, 243 aa, Oryza sativa
  misc_feature (208)..(208): Xaa can be any naturally occurring amino acid
  misc_feature (231)..(231): Xaa can be any naturally occurring amino acid
  misc_feature (238)..(238): Xaa can be any naturally occurring amino acid
MTDPSRYKLNHSMIRIKDPKRSLEFYQFLGMTLINKLPNPDAKFDLYFLAYDSPKAVSHGNHWTDREGIVELTHNYGTEDDPDYQITNGNAEPYKGFGHLCISVDNLQAACQRLEDAGYKFQKKLTDGRMRHIAFVLDPDGYWVEVIGQKSLEQTENVKETDISTYRMNHTMIRVKDKDISLRFYQDVMGMKLKRTSESPNAGFNLYXLGYGPDAPQSTANGVNPGADHEXLLELTWXYGTEK

SEQ ID NO: 29983 - protein, 401 aa, Lactobacillus johnsonii NCC 533
MLTKENLLNFSHKNNESSWLTDLRIKSFERLEELDYPKMQRFSYHDWPLIKKEDFPWSNQADFSLKEEQKLLEKKGIILTDIFTASKKYPELVQSTLGSVIKHNEDKLTAYHYAYLNSGLFLYIPKDTILTEPITISLSPTQDTYISHLLIVADNNSKVKFLEEIQDKDKKASSASLMVELIARPGSHIEFSSLDELSQDTTLYFNRRAKIEKDAHVEWAIAFMNDCNTLGDLDSELVGEGSFADSKAIAVTTGDQRVGINNRVTNRGPHSTGLINQRGVLLENSRLIFNGIGQIVHGAHGSKADQQNRVLMMSDEAHGDANPLLLIDENDVIAAHAASVGPVDKVQMNYLMSRGIPYDQAQRLVIRGFLGAVLDAIPNKDVRRKMIDILERKLIDGQIKH

SEQ ID NO: 29984 - protein, 107 aa, Chlamydomonas reinhardtii
MEAGAVNDDTFKNVVLESSVPVLVDFWAPWCGPCRIIAPVVDEIAGEYKDKLKCVKLNTDESPNVASEYGIRSIPTIMVFKGGKKCETIIGAVPKATIVQTVEKYLN

SEQ ID NO: 29985 - protein, 467 aa, Lactobacillus johnsonii NCC 533
MTKAEDIVKDEDYQFGFHDNVEPKFSTGRGLTEEVVRQISAEKHEPKWMLDYRLKAFHIYEKMPMPDFGPDLSGLDLDNMLYYQKMTDKKYRDWKDVPQDIKDTFERLGVPQAERKYLAGSAAQYESEMVYHKMKEQFDKLGIIFTDTDTALQEYPDLFKKYFGKLVPIDSNKFSALNCAVWSGGTFIYVPKGVQVPTPVQAYFRLNAENSGQFERTLIIVDEDAHLDYVEGCTAPQYSSDSLHAAVVEVNVLDNAYCRYTTIQNWSDNVYSLETKRAVAGKHATMEWVDGNLGAKVTMKYPSVYLNGEGARGTMLSIAVAHHGIHQDSGAGMFHNAPNTSSSIVSKSIAKGGGSTDYRGSVKFSKKSDGSKAHVECDTIIMDDMSSSDTIPTNAIENSNVAMEHEATVSKISEDQLYYLESRGIPERKATEMIIMGFVEPFTKQLPMEYAVELNRLISFQMEGAIG

SEQ ID NO: 29986 - protein, 125 aa, Glycine max
MFGSTKASSLPVSSRSEEGGLRRRLSSLSLKIQDSPTWSFSRSKSLSSMGDYVRTCWAWILSRKLIFATDLEMNDQKTKLLGSPNRGTWSHVFYKLRSEIRRFISTSDHATLPKTYHRSTVEIIT

SEQ ID NO: 29987 - protein, 171 aa, Citrus aurantium
HNLLFILGFNAFGGFSIFLPKLINAIASDTTGLQAKLRSEVKEKCGTSALTLESVKSLELVQSVVCETLRLNPPVPLQFARARKDFQLSSYDSVYDIKKGELLCGYQPLVMRDSKVFDDAESFKAERFMGEKGSELLSYLYWSNGPQTGTPNDMNKQCAGKDYVTLVACLT

SEQ ID NO: 29988 - protein, 1230 aa, Cryptococcus neoformans var. grubii
MNGFMPALRLHHTHSSSVSPTASNDAASSSPTSSQPHQLAAYSPLYATSPNRGSKITKGSSLSSSTAHHGLKYVRPSTSPLLKPPKGKSFSEYLGDWGSQELFTFLDIHKCGQYLAIFQENDINGKILLDLDVTALKSMGIDKISERVRLIGGIKDLRKRIADETIRAPFIQRCYPPERTLLPSLPSHSNVFLDKWDYSSSASRLGKGQIAFRPPPLDLQGHMPRKLLPHASQGIATIDTHDIRTTKPKIEAYIQQNPLGQPQSVPTKRSDSLTLCAPPSRNVRRRSPSSRHFEGRESQTDGFTILNMASDRQVPSSTMNSVTLGEDCHLQREEGLPLFLKVPQFRNTFASSHKTLIAGRGPLTRGDTISHQPSGPAIAGQDSPVNYRISKTVTTTKEASQGDLEHPFAVKSIGSQLGLLVGVSGMAHDPVTDGSKSKGKTSVPLTGTSSSDISAVNANSAALSLADLRRQLVKFINTEDDTIRTVNVMHVTSGEEILERALKKFGKWGTGMHSSPDVYGDEDGDETLEIDGWEVYTERTPDESSKPLSESSLLKTCTFHREGTAIQDKGLFLRKKQRLQKRKNIQHFFGETLPPPMSPTSPTLITGPHLGIVQGKSQLASEPAFSSSNRLSTLTNKGPNRASMISVMSGLGVPVINTLPSPQGNGLCPTGSVHSHKKKSMYNFFGHRPPSELISNHLADYFPSAKKSDVEKARHSLLRLSGDTVAYKKNGIDEGDNAPDHWSKPGNNQPPSLPPFEPSQDTLSDSLQAYASSTPVYLSRPKHNVALRRRRDSDSSSRSHTSVLMQTRRNRDRSDTASLLTVDEITAEVENRRASTIPKGDYIEETEDSSFIEGDTLPEYEESKGLLRTVCSDSNSIVDSGKSFQRDSDVDQQQELEDEEEDELDDEEEEEEEEKEDEDEQGKAFTSTGSKRIIKWIKGALIGAGSFGSVYLGMDAQSGLLMAVKQVELSAGSVKSEDRKKSMLSALEHEIELLKELQHENIVQYLDSSVDTNHLNIFLEYVPGGSVAALLNNYGAFEEGLVRNFVRQILTGLNYLHMRGIVHRDIKGANILVDNKGGIKISDFGISKKVENSLISGLRTNRPSLQGSVFWMAPEVVKQTSYSPKADIWSVGCLVVEMLTGTHPWADLTQMQAIFRIGSLARPAPPSDISVQADEFLRKTFEIEHAKRPTAAQLLKDPFIDSPRVRTTASNFISEAIVSEKMEVQVVEEM

SEQ ID NO: 29989 - protein, 636 aa, Triticum aestivum
MSKLLVIALLLLPLINHGIYLATAWDDQDFFKYCPPSKCSQHGPMIRYPLCLESSNTSSSSSCGCAGRSIWKLACSGQDTILVHPVLGPYSVSAIDYRRSSMKITPLVDPCLVLQQKLIISRSSSSPQVDVINDEKPSFDENFFESSSATIVHCSREFTPAAAHADSIAGPVSCLSNTTHFFYLVNSDEDMSILPLDCKVVPVSDRGGISLPHMLKDQMFYNFTETAKKIPSFAETAVSWDEGDCRECELSGRRCAFSSQRDREFCMPDPHGSHIKVIAATSSVAAFVALLLTVATVLYLSLKTRYNAEIHMKVEMFLKTYGTSKPTRYTFSEVKKMARRFKEKVGQGGFGSVYKGELPNGVPVAVKMLENSTGEGESFINEVATIGLIHHANIVRLLGFCSEGMRRALIYEFMPNESLEKYIFSDDSNIFQNLLVPEKLLDIALGIARGMEYLHQGCNQRILHFDIKPHNILLDYNFNPKISDFGLAKLCARDQSIVTLTAARGTMGYIAPELYSRNFGGVSYKADVYSFGMLVLEMVSGRRNSDPRIGSQDDVYLPEWIYEKVINGEELALTLETTQEEKDKVRQLAMVALWCIQWNPRNRPSMTKVVNMLTGRLQSLQMPPKPFVSSENELMS

SEQ ID NO: 29990 - protein, 637 aa, Senecio squalidus
MKTGQNFTLTSWLSNDIPDSGSFTLSWEPVDEASQRLIIRRSHQPYWTSGNLNDQTFQYLYALNSPGSQSHYNLSSVYSNEARYFSYERTNADLPMWILTPKGQLRDSDNSTVWTPEFCYGYESSNGCVESSLPQCRREGDNFSEKNGDFAPDIARSATDDNSSLSISDCFVKCWNDCSCVGFNSSTTDGTGCVIWTGSNNFLVNPRDNSTLKYVISQSPINPSAGNKTEESKTKESKTWIWILLGVVIPLALLCFGLLLYTKIKHRRKEYERRKRDEYFLELTASESFKDVHQLESNGGKGNDLLLFSFSSIMAATNDFSVENKLGQGGFGPVYKGKLSDGREIAIKRLSRTSGQGLVEFKNELILIAKLQHTNLVRVLGCCIHGEEKMLIYEYMPNKSLDFFLFDENRKAELDWPKRFNIIEGIAQGLLYLHKYSRMRVIHRDLKANNILLDENLNPKISDFGMARIFKENETEAMTNRVVGTYGYMSPEYAMEGTFSIKSDIFSFGVLMLEIVTGRKNTSFVHLDRTFNLIGYAWELWQQGDTLELKDPTLGETCGIQQFLRSVHVALLCVQESATDRPTTSDMISMLLNDTISLPTPNKPAFVIGKVESKSTDESKEKDCSVNDMTVTVMEGR

SEQ ID NO: 29991 - protein, 690 aa, Burkholderia vietnamiensis G4
MIAPSAAVPGWELEVPPFHAGELAVQQRAGVTEAAGAGGRRGIRRFMPDQHRTFFAQLPLFVLGGVDAHGQPWATLRVGMPGFVTAPDPRTLRIDGDALPGDPLAGTWRPGVPFGGLGIEFDTRRRNRVNGVVRAVDGGALTVAVDQSFGNCAKYIQARKPVRVPREGERSAADAAPEVSDRLSDADRVLLAQADTFFVASANTAAAAGPARGADVSHRGGMPGFVRVDDAHTLTTPDFSGNRFFNTLGNLQLDPRAGLLFVDFDSGDLLYVAADAEIVWDGPLVASFDGAQRVVRFRVREVRRTRRVLPLRWSPVERAPQFAAATRAPAATASQTAASHVPTPASAAPSASGWRALRIAKIVDEARAIRSFHFDAADGAALPAYEAGQHLTLRVALPGGDAPAIRSYTLSDAPGAAHYRITVKREGRVSAWLHDHARAGMTLDAQMPRGRFTFDVASPRPAVLVSAGIGITPMMAMLRRALADDSASRRVMFVHGARDAADRPFAAELARLAHADARVSLHCFDSRAQRDGAGRVDVAQLKRILPFDDYDFYLCGPAAFMRELYDGLRALNVADERIRFEAFGPSSVVRTTHRADRTSPAASVPVVFRRSARDAEWTPADGTLLEFAESRGVTVPSDCRAGSCGTCATRVLSGAVDYLHAYDAAVEPGCALLCVAQPAARAGEPLVLDR

SEQ ID NO: 29992 - protein, 421 aa, Chlamydophila abortus S26/3
MVIKFDDDARASCFVPVEKAIADIAEGKFVIVVDETSRENEGDLIIAGEKMTVEKMTFLLKYTTGIICASLDSERIKQLDLPPMVKDNRCRYRTAFTVSVDAAKGITTGVSAADRTRVVELLSDPNSVPGDFVRPGHFFPLMATPGGVLKRAGHTEAALDLMRLANMQPCGVLSELVNEDHTMMRLPQIIEFAMQHKLSIISTSDLVAYRMLSERLVVPISSARLPTEYGDFTIHVYESVLDGIQHIALVKGDVRGKENVLVRVHSECLTGDILGSIRCDCGCQLHSAMEYIGLEGEGVLVYLRGQEGRGIGLGHKVRAYALQDRGYDTVDANLEIGFPIDSREYGIGAQILVDLGLTKIKLITHNPHKYFGLQGYGLEIVDRIALPINLSEENECYLRTKKERMGHWIDFPSYKEEVNIR

SEQ ID NO: 29993 - protein, 490 aa, Pseudomonas aeruginosa PAO1
MARFEEQKLYIGGRYVEASSGATFETINPANGEVLAKVQRASREDVERAVQSAVEGQKVWAAMTAMQRSRILRRAVDILRERNDELAALETLDTGKPLAETRSVDIVTGADVLEYYAGLVPAIEGEQIPLRETSFVYTRREPLGVVAGIGAWNYPVQIALWKSAPALAAGNAMIFKPSEVTPLTALKLAEIYTEAGVPDGVFNVLTGSGREVGQWLTEHPLIEKISFTGGTSTGKKVMASASSSSLKEVTMELGGKSPLIIFPDADLDRAADIAVMANFFSSGQVCTNGTRVFIHRSQQARFEAKVLERVQRIRLGDPQDENTNFGPLVSFPHMESVLGYIESGKAQKARLLCGGERVTDGAFGKGAYVAPTVFTDCRDDMTIVREEIFGPVMSILVYDDEDEAIRRANDTEYGLAAGVVTQDLARAHRAIHRLEAGICWINTWGESPAEMPVGGYKQSGVGRENGLTTLAHYTRIKSVQVELGDYASVF

SEQ ID NO: 29994 - protein, 380 aa, Gibberella zeae PH-1
MTYLCFTEEVAALVIDNGSGMCKAGFAGDDAPRAVFPSIVGRPRHHGIMIGMGQKDSYVGDEAQSKRGILTLRYPIEHGVVTNWDDMEKIWHHTFYNELRVAPEEHPVLLTEAPINPKSNREKMTQIVFETFNAPAFYVSIQAVLSLYASGRTTGIVLDSGDGVTHVVPIYEGFALPHAIARVDMAGRDLTDYLMKILAERGYTFSTTAEREIVRDIKEKLCYVALDFEQEIQTAAQSSSLEKSYELPDGQVITIGNERFRAPEALFQPSVLGLESGGIHVTTFNSIMKCDVDVRKDLYGNIVMSGGTTMYPGLSDRMQKEITALAPSSMKVKIIAPPERKYSVWIGGSILASLSTFQQMWISKQEYDESGPSIVHRKCF

SEQ ID NO: 29995 - protein, 503 aa, Gibberella zeae PH-1
MLSTSVPNNCTFSPASATPHLTINHDVAADLDSTNAFEGPEKLLEVWFAPSPSTLPPTAAANGLKAVPADTWVPMLDMVNCKVLSVLESDNMDAYLLSESSMFVFPHKIILKTCGTTTLLLGLQRMLHIAAKYGFPYHNANSPDDIQAAATPYRVFYSRKNFLFPEKQQGPHRSWKQEVKYLDDMFDGGSAYMVGKMNGDHWYLYLTSPNQQALTPPRTPESEIEGTKIPVGTSFAPIPGSYHDETLEILMTDLDQENAKQFYLSHASAVASDKMAAEAKDARKEAINSLGGLGDDVDEVDVFANDADSNMLDSVEALTTEGHALGTVVSESCGLSSVYPTSKYPDARVDAYLFSPCGFSANGVVPPPASAEGGKGEHYFTVHVTPEPQCSFASFETNVPGGQSGRTTTEIIEHVVDIFKPGRFSVTLFEAKGAAQNPYCMGDDEPTNWAAKRLVDPVRGYRRVDRIVHDFEDYDLVFRFYEREGWAGSKSARVGEPISPTFK

SEQ ID NO: 29996 - protein, 475 aa, Triticum aestivum
  misc_feature (458)..(458): Xaa can be any naturally occurring amino acid
MGLPLKRTRRVSCLQQLFQIHGNLIQTTSTLAAAVASDHVRDCKIESSAFPLSRDDTTSGTRYQTENWNNCQFALSNGSAVLNNHSVPQSDLNYGDNDLNFIDWPSIDNFEDVDTLFRGCDSTYGEQQLENTDELSWIPSSDAIYSSDVALQAGFDTSYSDYGMLDDLSAFPCAQDKSLPTADEQFNDNYPFNEQKNVNVYGEQAYQGGAMELLSTDQICNGDGNLDMIGERYSSENALQQLEDRKFSVSSGSQLSSSQNLLKQKHHSDKTSPSNITSDCYSDRNCQFSPSGSFAQRNLMVQKQVANLQPGQLINDEGQLGQQTLTRRASYPCENYEVEKKGFGKRSKDTLGTSVVVDGSFVSSLSSDNSVEESSFRQLQDAVSQLDVKTKLCIRDGLYRLARSAQNRPVFPNAMNRHEGSRDVKDTQSMETSGKFVDHRSIETQTNPIDRSIALLLXFHQPSDQVAGAADNPRH

SEQ ID NO: 29997 - protein, 406 aa, Glycine max
MATLFQGLGVVNPSLASSNSNKFHLPSRTSLSERKDGIFVVRSDATRVSSQVLKAGARKHELLVTNAVATKEGRPAASTSKSGHELLLFEALREGLEEEMERDPCVCVMGEDVGHYGGSYKVTKGLATKFGDLRVLDTPIAENSFTGMGIGAAMTGLRPVVEGMNMGFLLLAFNQISNNCGMLHYTSGGQFKIPIVIRGPGGVGRQLGAEHSQRLESYFQSIPGIQMVACSTPYNAKGLMKAAIRSENPVILFEHVLLYNLKERIPDEEYVLSLEEAEMVRPGEHVTILTYSRMRYHVMQAAKTLVNKGYDPEVIDIRSLKPFDLHTIGNSVKKTHRVLIVEECMRTGGIGASLTAAITENFHDYLDAPIVCLSSQDVPTPYAGTLEEWTVVQPAQIVTAVEQLCK

SEQ ID NO: 29998 - protein, 130 aa, Vitis riparia
MAYQQDPCANPTRQTGKTGGQTDQYGNPVHQTEALGAYGAGTGTGMHGGEHQQQPHQQPGVLNRSGSSSSEDDGQGGRRKKGMKEKIKERIPGMGRKDEQKQTSATSTPGQGQQQKGMMEKIKEKLPGAH

SEQ ID NO: 29999 - protein, 453 aa, Rubrobacter xylanophilus DSM 9941
MIEVVNPATEEVLKRLEPASSSEVDAAVDRAKRAFPGWRDVPPAERARLLGRLAEALDAEREDLARTESLNVGKPLSAARAEMKMVVDTFAYYAGAPERLLGETIPVAGGVDMTFREPLGVVGLIVPWNFPLQITSWKVAPALAAGNTVVLKPAELTPLTALKLERIAGEAGIPEGVLNVVVGPGEIVGKRLVEHPEVAKIAFTGSTEVGRKIMAGAAGTVKRVTLELGGKSASIVFADADLEKAAAAAPLAVFDNAGQDCCARSRILVERGAFERFMSLLEPAVKELRVGDPQDETTQMGPLISASHREKVASYVTEEAPVAIRGEAPDGKGFWYPPTVLAPVSNKDRVAREEIFGPVAAVIPFEDEEEAVRLANDTIYGLSGSVWTRDVARALRVARRVETGTLSINSNTSVRVSTPFGGFKQSGVGRELGPHALEHYTEVKNVFVATEEG

SEQ ID NO: 30000 - protein, 111 aa, Triticum aestivum
MAHSAVAQVVLVAVVAAMLLAATEAAVSCGQVSSALSPCISYARGNGANPSAACCSGVRSLASSARSTADKQAACKCIKSAAAGLNAGIPTKCGVSVPYAISSSVDCSKIR

SEQ ID NO: 30001 - protein, 175 aa, Pseudomonas putida KT2440
MSLHDLQTLPGVTAQPDAATAQFVFNHTMLRVKDIEKSLDFYTRVLGFRLVDKRDFPEAAFSLYFLALVDPAQIPADDTARHQWMKSIPGVLELTHNHGTENDADFAYHNGNTDPRGFGHICISVPDVRAACARFEELEVPFQKRLQDGRMNHLAFVKDPDGYWVEVIQPTELEG

SEQ ID NO: 30002 - protein, 218 aa, Leuconostoc mesenteroides subsp. mesenteroides ATCC 8293
MSGIIAPSILSADYTNLERDVKLVEAAGAEYLHIDVMDGTFVPAISYGPNWVKQLRPETDLVLDVHLMIQNPERFVEEFADAGADIIGVHVEATPHIHRALQMIKNKGVKAEVVINPGTPVSAIEAVLDMVDQVLVMTVNPGFGGQKFLPSTLQKIEQLQTFREERGFDFDIEIDGGVNNETIKSAYDAGAKVFVAGSYVYDKVDPAAKIGILKDLIK

SEQ ID NO: 30003 - protein, 473 aa, Salmonella enterica subsp. enterica serovar Paratyphi A str.
MPTHLVWFRRDLRLQDNLALAAACRDASARVLALYISTPAQWQAHDMAPRQAAFISAQLNALQTALAEKGIPLLFHEVADFNASIETVKNVCRQHDVSHLFYNYQYEFNERQRDAAVEKTLPSVICEGFDDSVILAPGAVMTGNHEMYKVFTPFKNAWLKRLKEDIPPCVPAPKIRVSGALSIPLTPVSLNYPQQAFDAALFPVEENAVIAQLRHFCSQGADEYASRRDFPAVDGTSRLSASLATGGLSPRQCLHRLLAEQPQALDGGPGSVWLNELIWREFYRHLMTWYPALCKHQPFIRWTKRVAWQENPHYFQAWQKGETGYPIVDAAMRQLNATGWMHNRLRMITASFLVKDLLIDWWLGERYFMSQLIDGDLAANNGGWQWAASTGTDAAPYFRIFNPTTQGERFDRDGEFIRQWLPALRDIPGKAIHEPWRWAEKAGVVLDYPRPIVEHKQARIATLSAYEAARKGA

SEQ ID NO: 30004 - protein, 529 aa, Sulfitobacter sp. EE-36
MTQFDDLIRMQAAVQDRSILSLFDTADRAQTFSAQTGDMLFDFSKTNLDRDTMDALLGLVDAADVPARRDAMFAGEKINETEDRAVLHTALRNLDGGAVMVDGADVIPGVHDTLDRMRGFADQIRSSDITDVVNIGIGGSDLGPAMAVQALSPYHDGPRCHFVSNVDGAHISDTLRGLDAKTTLVIVASKTFTTIETMTNARTARAWMTENGGDPAKQFAALSTAQDKTSDFGIDADQVFGFEDWVGGRYSVWGPIGLSLMIAIGPRAFDAFLRGGQAMDRHFCAAAPHENMPMLLALVGIWHNQICGYATRAVLPYDQRLGQLPDYLQQLEMESNGKSTLMDGTAAPYHTGPVVWGAAGTNGQHAFYQLIHQGTRVIPCEFLIAANGHEPDLTHHHKLLIANCLAQSEALMRGRSLQEASELMAAKGLTGAELDRQARHRVFPGNRPSTTLSYPLLDPFTLGQIIALYEHRVFVEGVILGINSYDQWGVELGKELATSLQPIVEGAAPATDKDGSTAALVAFIAKHAD

SEQ ID NO: 30005 - protein, 118 aa, Oryza sativa
MARAQLVLVALVAAALLLAGPHTTMAAISCGQVNSAVSPCLSYARGLRPSAACCSGVRSLNSAASTTADRRTACNCLKNVAGSISGLNAGNAASIPSKCGVSIPYTISPSIDCSRELI

SEQ ID NO: 30006 - protein, 443 aa, Methanosarcina acetivorans C2A
MKIYESYEDLPKLKLPYGNEIFISDSTIRDGSQMPGIVLSREHKIQIYEYLHEIGIEKLEAFVFNKRDRDAVELMFDRGYECPEITGWARASRADIDKILEVDGLEETGILMSVSDTHIYSKMRLSGREEAEEKYLDALQYAVDHGLRTRAHLEDMTRADNYGFVFPLVKKIMEIDPDCIIRVCDTVGYGMPFMNIDEPYGIPKIVQYLKKDIGVKNIETHIHDDYGFGAASSIAGFWHGANWTSVTFLGIGERAGNSEMEKILLFLADRVEGFDKYNLEPVTRFAKFMEKELGLRVPRNKAVVGKNIFAHESGIHAAGVLKNPFNYEPYPPELVGSTRLLLIGDSSGLEVIRYKIQETLNDLLDVETIIEKDDRRLLKIQKEIQQLYDKEERVSCISDEELLAYVEKYFLYQPICDPAHTGRGKFKGKGKIQEPVEEVEETD

SEQ ID NO: 30007 - protein, 342 aa, Methanosarcina acetivorans C2A
MTKTAAVIKGDGVGPELVEAMLKVANAAGTDVEFVMCEAGAGWWEEHGGNSLVPDETWQILDSSDACFKGPTTTPGGIGSPRSVAVSIRRKYDLYANVRPIKTFPNSNAPLGDVEMVCVREGTEGLYIGEEIQLTDDVSIAIRKITRTASGKIARYAFEEAKRRGYDTVVPIHKSNILKLTCGSFLEEVEKVAQDYPNIEVWPYHIDNIAQQLIKNPQIFNKKVLLSTNLFMDVISEECSALVGSIGLIYSANLGDNFAMFEPAHGSAPKYAGLDKVNPVATVLAGAWMLDYLGEKEKSEAIFKATERVISEGKYVTYDVGGNAKLSQMADEIAKYTAEILK

SEQ ID NO: 30008 - protein, 131 aa, Brassica napus
KLRKERPMLTPDVIITCVGTEIAYGKSMVTDDSWVEIMNHKWDRGIVEEETSKFPELTLQRDCDQRPNKVSFFIDKSKAQEVTKELYQRLEKRGLEIKIIFSGGKALDVLPKGGGKGQALAYLLNKLKAEG

SEQ ID NO: 30009 - protein, 370 aa, Prunus armeniaca
TNEVPSIANYDRKSEVKTFDDTKEGVKGLVDAGITKVPRIFHLPVDQYPINNTCDSEPTKTQLRIPVIDLEGLEYDNSPTKRKETVAKVGEASETWGFFQIANHGIPVDVLEEIKNGVRGFFEQDTEVKKKYYTRDRFRPVIYNSNFDLYSAPATNWRDTFLCNMAPNPPKPEDLPQVCRDILVEYSKQVMKLGKLLFELLSEALGLKPSHLNDMDCSLGLQILGHYYPPCPQPELTLGTSKHADNDFITVLLQDHIGGLQVLHQNTWIDVLPVPGALVVNIGDLLQLISNDRFRSVEHRVLANRACPRVSVACFFSTGFLALPRIYGPIKELLSEDNLPKYRETTVKDYNAHHYNKGLDGTCALTHFKL

SEQ ID NO: 30010 - protein, 352 aa, Gluconobacter oxydans 621H
MPEFSRNGVGQVMAVKIAINGFGRIGRLVLRGIIESGRTDVEVVAINDLGSVEANAHLLAYDSTHGRLPGTVRAEGNSLIIEANGRTYGPIKVSAERNPAQVPFQGVDVAMECTGLFTSREKASALLEAGAKRVVISAPATDVDATIVYGVNNDVLTPDMKIISNASCTTNCLAPVASVLDKAFGIECGYMVTIHSYTGDQRTVDTLHKDPRRARAAALNMIPTSTGAAKAVGLVLPHLKGKLDGTSIRVPTPNVSVVSLDFVPTRTPASAEAVNEAIRAASLEGPLKGILEYNTAPLVSSDFNHDKASSIFDATQTVLVDGGKMVRVCSWYDNEWGFSNRMADTAALFGSL

SEQ ID NO: 30011 - protein, 235 aa, Saccharomyces cerevisiae
DGAHIGNYQIVAKVKLAYHTTTGQKVALKIINAAAMQGRIEREISYLRLLRHPHIIKLYDVIKSKDEIIMVIEYAGNELFDYIVQRDKMSEQEARRFFQQIISAVEYCHRHKIVHRDLKPENLLLDEHLNVKIADFGLSPNYAAPEVISGPEVDVWSCGVILYVMLCRRLPFDDESIPVLFKNISNGVYTLPKFLSPGAAGLIKRMLIVNPLNRISIHEIMQDDWFKVDLPEYLL

SEQ ID NO: 30012 - protein, 239 aa, Saccharomyces cerevisiae
DGAHIGNYAAAAKVKLAYHTTTGQKVALKIINAAMQGRIEREISYLRLLRHPHIIKLYDVIKSKDEIIMVIEYAGNELFDYIVQRDKMSEQEARRFFQQIISAVEYCHRHKIVHRDLKPENLLLDEHLNVKIADFGLSPNYAAPEVISGKLYAGPEVDVWSCGVILYVMLCRRLPFDDESIPVLFKNISNGVYTLPKFLSPGAAGLIKRMLIVNPLNRISIHEIMQDDWFKVDLPEYLL

SEQ ID NO: 30013 - protein, 424 aa, Glycine max
MAVEYTCCSTAFFVHIVVIVLLVLFAGLMSGLTLGLMSLSLVDLEVLAKSGTPQDRKHAEKILPVVKNQHLLLCTLLICNAAAMETLPIFLDGLVTAWGAILISVTLILLFGEIIPQSVCSRYGLAIGASVAPFVRVLVCICFPVAFPISKLLDFLLGHRHEALFRRAELKTLVNLHGNEAGKGGELTHDETTIIAGALELSEKTASDAMTPISETFTVDINSKLDSRELMNEILEKGHSRVPVYYEQPTNIIGLVLVKNLLTIDPEEEIPVKNVTIRRIPRVPETLPLYDILNEFQKGHSHMAVVVRHCEKTGQQSSNNNADVRDVKVDIDGEKNPQENMLKTKRSLQKWKSFPNSNNSNRGGSRSRKWSKNMYSDILEIDGNSLPSLPEKEEAVGIITMEDVIEELLQEEIFDETDHHFEDS

SEQ ID NO: 30014 - protein, 900 aa, Neisseria meningitidis MC58
MQLHILNNPKDAALAADAEFLKQSLFNLLHEEASPLVVETVKLLSTSDDSAALIEKVLPQLDEQQTHDLTLACGLFAQILNIAEDVHHERRRQIHEEAGRGGAEGSLTETVRRLKAGKADGKSVQRQLDNTSVTAVLTAHPTEVQRQTVLSFNRRIRALLPQRERCTNADALARLRREIDTILLGLWQTSETRRHKLSVNDEINNGVSIFPMSFFEALPKLYRKMEHDFQTAYPGVRVPDILKIGGWIGGDRDGNPFVSAETLRFAFRRHADAVFRFYRGELDKLYRELPLSIRRVKVNGDVTALSDKSPDEEIARAEEPYRRAIAYIMARAMGKARALGLGMGCKFGFLEPYASAQEFLDDLKKLQRSLIDNGSRLLAEGRLADLIRSVSVFGFHMMPLDLRQHAGKHADVVAELFQHAGLEDYNRLNEEQKQTALLRELSHQRPLYSPFITYSDHTRHELAIFNEARKIKDEFGEDAVTQSIISNCEQPSDLLALALLLKETGLLAVENGKPHSRINIVPLFETIEALENACPVMETMFRLDWYDALLESRGNIQEIMLGYSDSNKDGGYVTSSWCLYQAELGLVELFKKYDVRMRLFHGRGGSVGRGGGPSYQAILAQPAGSVAGQIRITEQGEVITAKYADPGNAQRNLETLVAATLEASILPDKKDPDAKLMQALSDVSFKYYRELITHPDFIDYFLQTSPIQEIATLNLGSRPASRKTLARIQDLRAIPWVFSWMQNRLMLPAWYGFGSAVETLCEDKPETLAALREHAQSNPFFQAMLSNMEQVMAKTDITLAENYAGLSESPDKAKIIFGMIKEEYRRSRKALLDLLQTEELLRDNRSLARSLALRIPYLNALNGLQVAMLKRLRKEPDNPHALLMVHLTINGVAQGLRNTG

SEQ ID NO: 30015 - protein, 326 aa, Zea mays
MASTLLHAATASLQSSSQPARAGAATAFHPLASTPSIRLARSSFSSNRRLEVSLRAVSAGHRFAGRGAPRGRRVVAALAGEQTEGSEVGDDKDNSNGEIKPEEAQEAWKVMLEQFKAEALRMQALSMQAYDVYSKRAREVLLEASEKLKIQADKAQKDLSVIATEVSQEGQEYLVMAARNSPDSIKDITTTFRALGRLNWPSEYEDYHVGIPFGTFLTVGGFLNFMLTGSTSALRFGIVLGLALLTLGISSLRSHREGDRRPRLLVKGQAAIALVIFFREFSVLLQNGWFPKIFIVLLSGVVAAFYFYRIATGNPKDLSSKNDSAN

SEQ ID NO: 30016 - protein, 434 aa, Robiginitalea biformata HTCC2501
MGKSVNIFWFRRDLRLEDNRGLCEALGAGRPVLPIFIFDSEILDGLPADDPRVTFLHDRLQELRSRMQENQGSSLAIYHGKPLEIFKELASDWDVGQVFTNRDYEPYARDRDEQVGQWLSEQGIEFHTFKDQVIFEKDEVVKDDGDPYVVYTPYMKKWKQVFRDTPLATFDSAGQLGNLIAHSRLPNPDLADFGFERSAIPVPDYDMGGKLIDAYEDNRNYPAREGTSRLGPHLRFGTISIRQALGKALESSNETFWNELIWREFFMQILWHFPRTVHEAFRKEYDRIAWRNDESEFEKWREGRTGFALVDAGMRQLNASGYMHNRVRMLTASFLCKHLLIDWRWGEAYFAEKLLDYEMASNVGNWQWAAGSGVDAAPYFRIFNPMTQVDKFDKDKSYIREWIPEYGTEDYPEKMVDHKAARERCLKTYKAALD

SEQ ID NO: 30017 - protein, 498 aa, Rhodopseudomonas palustris CGA009
MRTVGHFIGGKEVEGKSGRFADVFEPMTGEVKAKVALATKAELRAAVENAKAAQPEWGATNPQRRARVLMKFLELVQRDYDKLAELLAREHGKTIPDAKGDIQRGLEVAEFACGIPHLMKGEYTEGAGPGIDIYSMRQPLGVVAGITPFNFPAMIPMWKFAPAIACGNAFILKPSERDPGVPMALAALMLEAGLPPGILNVVNGDKEAVDAILDDPDIKAVGFVGSSPIAQYIYERAAQTGKRAQCFGGAKNHAIIMPDADIDQTVDALIGAGYGSAGERCMAISVAVPVGKATADALMSKLIPRVEALKIGPSTDPTADYGPLVTKEALERVKNYVDIGVKEGATLAVDGRGFKMQGYENGFYMGGCLFDNVTKDMRIYKEEIFGPVLSVVRAHDYAEALSLPSDHDYGNGVAIFTRDGDAARDFAAKVNVGMVGINVPIPVPIAYYTFGGWKKSGFGDLNQHGPDSIRFYTKTKTVTSRWPSGVKEGAEFSIPLMK

SEQ ID NO: 30018 - protein, 329 aa, Frankia sp. CcI3
MQRRPPVPSRSPRGAGGAGRLPESLGGLRLAGAVPLDPKPATPPPPASSAATAAPDARPGAPAGPVVIDVTEASFATDVVSRSMQVPVVLDFWASWCGPCKQLSPILEKLAAADGGRWILAKIDVDANPGLAQAADVQGIPAVKAVIGGRIIGEFTGAVPEREVRSWLDQLLSLVGEAMGAVPGAAAAGGPARDPHVAAAEAALARGDFDTAVESYRIRLTEAPADPEALTGLARAELLRRVHGYDPVDVRNRLVANPDDVEAAVAAADLGIAQGDVAGALAGLVEVVRRTAGPERERVRAHLVGLFQALGDEEPAVAPARRSLAAALF

SEQ ID NO: 30019 - protein, 579 aa, Staphylococcus aureus subsp. aureus MRSA252
MAKIKANEALVKALQAWDIYHLYGIPGDSIDAVVDSLRTVRDQFKFYHVRHEEVASLAAAGYTKLTGKIGVALSIGGPGLIHLLNGMYDAKMDNVPQLILSGQTNSTALGTKAFQETNLQKLCEDVAVYNHQIEKGDNVFEIVNEAIRTAYEQKGVAVVICPNDLLTEKIKDTTNKPVDTSRPTVVSPKYKDIKKAVKLINKSKKPVMLIGVGAKHAKDELREFIEMAKIPVIHSLPAKTILPDDHPYSIGNLGKIGTKTSYQTMQEADLLIMVGTNYPYVDYLPKKNIKAIQIDTNPKNIGHRFNINVGIVGDSKIALHQLTENIKHVAERPFLNKTLERKAVWDKWMEQDKNNNSKPLRPERLMASINKFIKDDAVISADVGTATVWSTRYLNLGVNNKFIISSWLGTMGCGLPGAMASKIAYPNRQAIAIAGDGAFQMVMQDFATAVQYDLPLTVFVLNNKQLAFIKYEQQAAGELEYAVDFSDMDHAKFAEAAGGKGYTIKSASEVDAIVEEALAQDVPTIVDVYVDPNAAPLPGKIVNEEALGYGKWAFRSITEDKHLDLDQIPPISVAAKRFL

SEQ ID NO: 30020 - protein, 289 aa, Oryza sativa
MAPAAASLTAPNALAATSLPFLHGRKSGGGGVSVHAGAPSPSRAVAVVARRLWGSASSSRRMVVAAATAAEMAPAASGEEGKPFVEEMRAVAMRLHTKDQAKEGEKEPQAPPVARWEPSVDGYLRFLVDSKLVFETLETIVDRAAVPWYAEFRNTGLERSEQLKKDLEWFKEQGHTIPEPSAPGTTYASYLEELAEKDSQAFICHFYNVYFAHTAGGRMIGKKVSENILNKKELEFYKWEGNLSQLLQNVRNKLNEVASSWTREEKDHCLDETEKSFSYSGDLLRHIFT

SEQ ID NO: 30021 - protein, 413 aa, Triticum aestivum
MSVSSSSMCGGDAGMKCVVWFRRDLRVEDNPALAAAARTAGEVVPAYVWSPEEDGPYFPGRVSRWWLSQSLKHLEASLHRLGAAKLVTRRSPDSVAALLQLVRDTGATHLFFNHLYDPISLVRDHRLKEMMTAEGIVVQSFNADLLYDPWEVNDDKGQPFNMFMPFWNRCLSMPYDPPAPLLPPKRINSGDLSMCPSDDLIFEDESERGSNALLARAWSPGWQNADKALSAFLNGPLIDYSVNRKKADSANTSLLSPYLHFGELSVRKVFHLVRMKQLVWSNEGNHAAEESCTLFLRSVGLREYSRYLCFNHPCSHEKPLLAHLRFFPWVVDESTFKFWRQGRTGYPLVDAGMRELWATGWLHDRIRVVVSSFFVKVLQLPWRWGMKYFWDTLLDADLESDALGWQYLGRDHA

SEQ ID NO: 30022 - protein, 227 aa, Chlamydophila abortus S26/3
MAFLILLRHGKSVWNEKNLFTGWVDIPLSQKGIDEAMLAGEAIKDLPIDCIFTSSLVRSLMTALLAMTHHNSKKIPYIVHDDPEQKHMSKIYSDEVNHMIPLYRSSALNERMYGELQGKNKKKTAEQFGEEQVKLWRRSYKTAPPNGESLYDTGQRTIPYFQETIFPLLQNSKNVFVSAHGNSLRSLIMDIEKLSEEEVHSLELPTGKPIVYLWTGHTFERHPELFG

SEQ ID NO: 30023 - protein, 130 aa, Vitis vinifera
MAYQQDPCANPTHQTGKTGGQTDQYGNPVHQTEAMGAYGAGTGTGMHGGEHQQQPHQQPGVLHRSGSSSSEDDGQGGRRKKGMKEKIKERIPGMGRKDEQKHTSATSTPGQGQQQKGMMEKIKEKLPGGH

SEQ ID NO: 30024 - protein, 338 aa, Brassica napus
  misc_feature (184)..(184): Xaa can be any naturally occurring amino acid
  misc_feature (198)..(198): Xaa can be any naturally occurring amino acid
MSIPMELMSIRNPNSTFLHRPHSHPPATLRSLRFQHLPNQRHHLTSPSLVSCTGLRLRFTSDTKLNRSFVAFAASHEDSEPSDVEVEKEKSVVDGDDNDSTSQEAWKQTLASVKEQVSKIQSVSSEAYNVNSQKAMTILKDTSEQLRIQAEKAKEELGTKAKEVGEEGKEYILKAAEESPSDVXKEIVEAFSSTEDLXRDVSRTQDFHVGIPYGLPLFVGGFLSFMISGSIPAIRFGVILGGALFALSMASLKAQRLGESSAKFLKGQMAIVAIIFLKELKLVLFQKSTFMGFLPPLTSGGVLAFYGSKLVSNKKKGPNKEQGGEEDETSEGFASREG

SEQ ID NO: 30025 - protein, 325 aa, Photobacterium sp. SKA34
MNKDNKKYGVLLVNLGTPDAPTAAGVKQFLSQFLHDHRVVDMTRWLWCPILHVVILPIRSPKVAKLYQSVWMEDGSPLMVYSKRQQKALTEILQVPVELGMTYGNPSTQSGLERLKQQGCDKVLVLPLYPQYSGTTTAAVFDRIAKDLKSISYIPELRFINHYFDHPDYISALAESAKTVWAEKGEPDYLLCSYHGIPKRYADNGDPYPDHCNGTTALLAKLLEMPREKMSMSYQSIFGREEWLKPYTEGTIKSLAEKGVKRLDVMCPAFSVDCLETLEEIAEECKEVFIESGGVEFNLIPCLNDSQAHIAMMENLVKQHVQGWE

SEQ ID NO: 30026 - protein, 124 aa, Vitis vinifera
MAYQQDPCANPTHQTGKTGGQTDQYGNPVHQTEALGAYGAGTGTGMHGGEHQQQPHQQSGSSSSEDDGQGGRRKKGMKEKIKERIPGMGRKDEQKQTSATSTPGQGQQQKGMMEKIKEKLPGGH

SEQ ID NO: 30027 - protein, 111 aa, Nostoc sp. PCC 7120
MSKGVITITDAEFESEVLKAEQPVLVYFWASWCGPCQLMSPLINLAANTYSDRLKVVKLEIDPNPTTVKKYKVEGVPALRLVKGEQILDSTEGVISKDKLLSFLDTHLNNN

SEQ ID NO: 30028 - protein, 556 aa, Photobacterium sp. SKA34
MCSVFGILDIKSDAAALRPIALEMSKKLRHRGPDWSGIYASEHAILAHERLAIVGLNSGAQPIYSPDKKLILAVNGEIYNHKEIRARYEGKYDFQTDSDCEVILALYQDMGEELLEELNGIFAFVLYDEEKDTYLVGRDHIGIIPLYQGSDENGNYYVASEMKALVPVCKTVSEFPPGSYYGSADAEPQRYYNRDWNEYAAVQGNSTSKEELTEALEAAIKRQLMTDVPYGVLLSGGLDSSITSAVAKRFAAMRIEDNDQSEAWWPQLHSFAVGLEGAPDLKAAREVADKIGTVHHEMTYTIQEGLDAIRDVIYHIETYDVTTIRASTPMFLMGRKIKAMGIKMVLSGEGADEIFGGYLYFHKAPNAKEFHEETVRKLLALNMFDCARANKSLAAWGVEGRVPFLDKEFIDVAMRLNPEDKMCGNGKMEKHILRECFEHYLPESIAWRQKEQFSDGVGYNWIDTLKEVAEEKVTDQQLETAAYRFPYNTPTTKEAYAYREIFEELFPLESAAKCVPGGPSIACSSAKAIEWDESFKNAADPSGRAIAAVHNEAYKK

SEQ ID NO: 30029 - protein, 538 aa, Saccharophagus degradans 2-40
MLDQTLINQLKQYVQHIKRPVELVLTLNSSDKSEELQALGEQLASLSDLISLQIDAASSKRSPTLLVRSPDTKSEIRFSGIPLGHEFTSLVLALLHTGGHDTKQEQAILDQIKTLELPKGAEYFEFETYISLSCQNCPEVVQALNILAAINPQIKHTMIDGALFEQEVSERKVMAVPSVFLNGKLFGQGRMNISQILAKLDSGSAEKQKNALNEKPNFDMLIVGGGPAGASAAIYAARKGIKTGIAAERFGGQVADTLAIENFISVKATEGPKLVSSLESHVRDYDVDIMQGQQAAKLTPASESQSGLVEITLTNGAVLKSRSVLLATGARWRELGVPGEQEYRGKGVAYCPHCDGPLFKGKPVAVIGGGNSGVEAAIDLAGITSHVTLLEFGETLRADDVLVRKLKSLPNVKIITSAQTTEVHGDGEKVTGLRYTNRETNIEHSVALAGVFVQIGLIPNSEWLGEPSGNAVKRTRYGEIETNSKGETSVPGVFAAGDVTTAPYKQIIVAMGSGASAALGAFDYLMRQETDESKSVAA

SEQ ID NO: 30030 - protein, 530 aa, Arabidopsis thaliana
MAEEAKSKGNAAFSSGDYATAITHFTEAINLSPTNHILYSNRSASYASLHRYEEALSDAKKTIELKPDWSKGYSRLGAAFIGLSKFDEAVDSYKKGLEIDPSNEMLKSGLADASRSRVSSKSNPFVDAFQGKEMWEKLTADPGTRVYLEQDDFVKTMKEIQRNPNNLNLYMKDKRVMKALGVLLNVKFGGSSGEDTEMKEADERKEPEPEMEPMELTEEERQKKERKEKALKEKGEGNVAYKKKDFGRAVEHYTKAMELDDEDISYLTNRAAVYLEMGKYEECIEDCDKAVERGRELRSDFKMIARALTRKGSALVKMARCSKDFEPAIETFQKALTEHRNPDTLKKLNDAEKVKKELEQQEYFDPTIAEEEREKGNGFFKEQKYPEAVKHYSEAIKRNPNDVRAYSNRAACYTKLGALPEGLKDAEKCIELDPSFTKGYSRKGAIQFFMKEYDKAMETYQEGLKHDPKNQEFLDGVRRCVEQINKASRGDLTPEELKERQAKAMQDPEVQNILSDPVMRQVKAVASIVF

SEQ ID NO: 30031 - protein, 239 aa, Brassica napus
  misc_feature (197)..(197): Xaa can be any naturally occurring amino acid
MAGSAPEGTQFDARQFDQKLNEVLEGQDEFFTSYDESHDSFDAMGLQENLLRGIYAYGFEKPSAIQQRGIVPFCKGLDVIQQAQSGTGKTATFCSGVLQQLDYSLVQCQALVLAPTRELAQQIEKVMRALGDYLGVKVHACVGGTSVREDQRILQAGVHVVVGTPGRVFDMLKRQSLRADHIKMFVLDEADEMLSRXGFKDEIYDIVQLLPALIQVGVISATMPTDAPEITRKFMSTPV

SEQ ID NO: 30032 - protein, 370 aa, Aspergillus nidulans FGSC A4
MSEKSYNILVLPGDGIGPEVMAEATKILSLFNTSTVRFRTQTELIGGCSIDTHGKSVTQAVLDAAVSSDAVLFAAVGGPKWDHIRRGLDGPEGGLLQVRKAMDIYANLRPCSVDSPSREIARDFSPFRQDVIEGVDFVVVRENCGGAYFGKKVEEDDYAMDEWGYSASEIQRITRLSAELALRHDPPWPVISLDKANVLASSRLWRRVVEKTMSEEYPQVKLVHQLADSASLIMATNPRALNGVILADNTFGDMVSDQAGSLVGTLGVLPSASLDGLPKPGEQRKVHGLYEPTHGSAPTIAGKNIANPTAMILCVALMFRYSFNMEAEARQIEAAVRTVLDKGIRTSDLGGSTGTREFGDAVVAALKGEL

SEQ ID NO: 30033 - protein, 329 aa, Pyrococcus furiosus DSM 3638
MLKKSEEIEGTKVEGPWLDDTKSLEEVVSLYTQIGFQATHLGKAIEIWRKIEEKREKGEEIRVFLGYTSNIVSSGLREIIAWLVKHRKVDVIVTTAGGVEEDFIKALKPFILGDWIVNDAELRKKGINRIGNIFVPNDRYIEFEKYMIPFFERILEIEREKGRPLTASEFIYELGRFMDEKLGKEKEKSIIYWAYRNEIPIFCPAITDGSIGDMLYFFKEERRDRELIIDIANDIVKLNNLAVTAKETASIILGGSLPKHAIINANLFRGGSDYAIYITTAVPWDGSLSGAPPSEGVSWGKIRAKADYVEIWADATLVFPILVWMVMKR

SEQ ID NO: 30034 - protein, 255 aa, Silicibacter sp. TM1040
MSDVSDWWRTSIIDMEPGRIELRGHPIQDLIGNVSFAEMIWLMVRGDRPTAPQSRLFEAALVSAVDHGPQAPSIAAARMAVTCGLPLNNAMATAVNMLGDVHGGAGQQAVELYHHVDAHGGDLATALDDWRAEHGKIIPGFGHRFHKPTDPRAPRLMALVSEIAETGAVSGRFLRIAEAIEAHISAEKGTALPMNIDGATAVIYAELGFAPPLARGLFCLSRSVGILSHAWEQQQQGGRNKGPTPPKYRWTYDPN

SEQ ID NO: 30035 - protein, 555 aa, Aspergillus nidulans FGSC A4
MAEPEKTELEALEVVRERAQDADAFIDEMEQKLEATGGLETGFFQIQFKDPKHFTWLLVAFASMGGLLSGIDQSTISGANLYLPKDLHLDARQNSLVNSGMPLGAVGGALILSPCNEYLGRKWSIIISLILYTIGAALEAGSINYGMMVAARVILGVGVGLEGGTVPVYVAETVERRIRGNLVSLYQFNIALGEVLGYAISAMFLRVPGNWRYILGSSLVFSTIMFVGMLFLPESPRFLVHQGKTLDAYKVWKRIRGIQTVEARDEFFVMTASVRQEENEVHEGAHNKRFPWMDFFTVPRARRSLIYANIMIILGQMTGINAIMYYMSVLMNQIGFNEENANYMSLVGGGSLLLGTIPAIFLMESFGRRFWAIVTLPGFFIGLVLIGASYQVDLKTDLMTVEALYLTGLIVYQGFFGCYACLTWVVPSEVYPTYLRSYGMTTSDALLFLMSFIVTYNFTAMQEAMGKTGLSLGFYGGIAAVGWVYQVFFMPETKDKTLEEIEEVFSRPTMDIVRENWAGVKETCGNLARGNFRKVFAEQTKRRRSVHETELKGLA

SEQ ID NO: 30036 - protein, 546 aa, Salmonella enterica subsp. enterica serovar Paratyphi A str.
MAIHNRAGQPAQQSDLINVAQLTAQYYVLKPEAGNAEHAVKFGTSGHRGSAGRHSFNEPHILAIAQAIAEERAKNGITGPCYVGKDTHALSEPAFISVLEVLAANGVDVIVQENNGFTPTPAVSNAILVHNKKGGPLADGIVITPSHNPPEDGGIKYNPPNGGPADTNVTKVVEDRANALLAGGLQGVKRISLDAAMTSGHVKAVDLVQPFVEGLADIVDMAAIQKAGLTLGVDPLGGSGIEYWKRIAEHYKLNLTLVNDQVDQTFRFMHLDKDGAIRMDCSSECAMAGLLALRDKFDLAFANDPDYDRHGIVTPAGLMNPNHYLAVAINYLFQHRPLWGKDVAVGKTLVSSAMIDRVVNDLGRKLVEVPVGFKWFVDGLFDGSFGFGGEESAGASFLRFDGTPWSTDKDGIIMCLLAAEITAVTGKKPQEHYNELAARFGAPSYNRLQASATSVQKAALSKLSPEMVSASTLAGDPITARLTAAPGNGASIGGLKVMTDNGWFAARPSGTEDAYKIYCESFLGEEHRKQIEKEAVEIVSEVLKNA

SEQ ID NO: 30037 - protein, 469 aa, Rhodopirellula baltica SH 1
MTEVKLPELGDGIESGDVLEIFVSVGDVITAGQDIVEMETDKATVPVPSDVGGKVTKISVGEGDTVPIGGVLIEVEAAAGAESAPAPAAPAEPEKKPEPKPEPQAEAPAPEPAAPPAAKPAAPAAPPVAQPVATPAARTPAVADEPDAPVDGGGSIPAGPAIRRFARETGVNLASVTGTGAGGRITRDDVLAVVRSASQKAAAPAAKPAPSAGTAAPRTNVTSGDLPGTPDTDDYGPIRVERMSKIRKTISAQMHLSWSTVPRVTNFDDADITDLERLRQSSKDDYAAQGLKLTTMPFLVKAVATALRHHPSLNAVIDSENQQVIYKDYVNIGIAVDTDNGLVVPVMHNADQMGIPDTARNIAEMAGKVRGGKFGVNDLRGGSFTISNLGAIGGQYSTPIVNVPEVAILLVGRSRKLPVVMPDDSIQPRLMMPLSLSYDHRLVDGGTAARFLNDVIGYLQAPSRLLLAL

SEQ ID NO: 30038 - protein, 224 aa, Oryza sativa
RAAGIGTRLHLRCLSSARRLLLDSTEPEAFPGTRRRRQARQPPPPPPLRLCFLSCSRARAGGGETVRRPTRPTPIPFQRPHCGSNRRFTMMSAKLLRSMSVRRLLGQQRNSVEFYRKSQAWNSTASFSDVDEKNRKGGDAEDDFTHSRPDHVFRGVHRAIICGKVGQVPVQKILRNGHTVTVFTVGTGGMFDQRTVGAENCQCQLSGIEYLFTMSSLVHLPFRS

SEQ ID NO: 30039 - protein, 374 aa, Methanosarcina acetivorans C2A
MRSIVEEALARSALEGRAVQGEYSDSDYSNENLEVDAELEEILRSLKTTIKVIGCGGGGSNSIQRMMGEGIQGADLVALNTDAQHLLHIRSGKKILIGKKKTRGLGAGSLPQIGEDAAIESIDEINKIVQGSDMVFITAGLGGGTGTGSAPIVAEAARDAGALTIAVVTLPFSVEGHVRRTNAEAGLERLRDVADTVIVVPNDKLIEVVPRLPLQAAFKVSDEVLMRAVKGITELITKPGLVNLDFADIRTVMQNGGVAMIGLGESDGENKAVESVQKALRSPLLDVDISGATSALVNVVGGPDMTISEAECVVQEVYNRIDSNARLIWGAQVDPDLEQTVRTMIVVTGVTSAQIYGHGSDKNITYKYGIDFVE

SEQ ID NO: 30040 - protein, 264 aa, Streptococcus downei
VASTDGPMPQTREHILLSRQVGVKNLIVFMNKVDLVDDEELLELVEMEIRDLLSEYDFPGDDIPVVQGSALKALEGDTAAEDKIMELMDIVDDYIPEPKRDTDKPLLLPVEDVFSITGRGTVASGRIDRGTVKVNDEVEIVGIKDEIQKAVVTGVEMFRKQLDEGLAGDNVGVLLRGIQRDEIERGQVLAAPGSIHPHTKFKGEVYILSKEEGGRHTPFFNNYRPQFYFRTTDVTGSIELPAGTEMVMPGDNVTIDVELIHPIA

SEQ ID NO: 30041 - protein, 265 aa, Streptococcus dysgalactiae
VVASTDGPMPQTREHILLSRQVGVKHLIVFMNKIDLVDDEELLELVEMEIRDLLSEYDFPGDDLPVIQGSALKALEGDTKFEDIIMELMDTVDSYIPEPERDTDKPLLLPVEDVFSITGRGTVASGRIDRGTVRVNDEIEIVGIKEETKKAVVTGVEMFRKQLDEGLAGDNVGILLRGVQRDEIERGQVIAKPGSINPHTKFKGEVYILSKDEGGRHTPFFNNYRPQFYFRTTDVTGSIELPAGTEMVMPGDNVTINVELIHPIA

SEQ ID NO: 30042 - protein, 221 aa, Prochlorococcus marinus subsp. pastoris str. CCMP1986
MYMNYLISSFYLGYYFKVEFQVSIFVGNLPFRAEREDILELFTPYGEVMNCSLPLERDTGRKRGFAFVEMADEALETSAIDGLQGTELMGRPLRINKAEPRGGGGGPRRGGGGGRGGYGGGGNGGGYGGGGNGGGYGGGGNGGGYGGGGNGGGYGGGGRGGYGGGGNYSEPASSYVNKSSGAEGWEDRSYGNSSENSDFENGRSRRKRSVASNSEISQEGN

SEQ ID NO: 30043 - protein, 457 aa, Triticum aestivum
  misc_feature (410)..(411): Xaa can be any naturally occurring amino acid
  misc_feature (420)..(420): Xaa can be any naturally occurring amino acid
  misc_feature (424)..(424): Xaa can be any naturally occurring amino acid
VTLQNKFVQKSRLRTGPEFPGYRRPTRPSSGDVCGVLVQYPGTEGEVLDYAEFVKDAHAHGVKVVMATDLLALTTLRPPGEIGADIAVGSAQRFGVPMGYGGPHAAFLATSQEYKRLMPGRIIGVSVDSSGKPALRMAMQTREQHIRRDKATSNICTAQALLANMAAMYAVYHGPAGLKAIADRVHGLAGTFAHGLKKLGTVTVQELPYFDTVKITCADANAIAEEARKNEMNLRVVDANTITVAFDETTTLEDVDKLFKVFSGGKPVDFTAESIAPEVSSSIPPSLVRDSPYLTHPIFSMYHTEHELLRYLHKLQSKDLSLCHSMIPLGSCTMKLNATVEMMPVTDPKFANMHPFAPIDQAAGYHEMFDNLGDLLNTITGFDSFSLQPNAGASGEYAGLMVIRAYHKAXXGTTNRNVLXSIPXVSAQGTKPCKLLLCVGMKNWFPVWNWIQVTINN

SEQ ID NO: 30044 - protein, 275 aa, Streptococcus equi
GAILVVASTDGPMPQTREHILLSRQVGVKHLIVFMNKVDLVDDEELLELVEMEIRDLLSEYDFPGDDLPVIQGSALKALEGDSKYEDIIMELMDTVDSYIPEPERDTDKPLLLPVEDVFSITGRGTVASGRIDRGTVRVNDEIEIVGIRDEIKKAVVTGVEMFRKQLDEGLAGDNVGVLLRGVQRDEIERGQVIAKPGSINPHTKFKGEVYILTKEEGGRHTPFFNNYRPQFYFRTTDVTGSIELPAGTEMVMPGDNVTIDVELIHPIAVEQGTT

SEQ ID NO: 30045 - protein, 644 aa, Triticum aestivum
MESSRGILIPGTPPLPYAYEPLPSSSADANGQEDRRTSGGVRWRAWATVLAVVALVVAAAVFGASRVDRDAVVSSASATAVHGVSGAYSSHGGFPWSNAMLEWQRTGYHFQPEKNYQNDPNGPVYYKGWYHFFYQHNPGGTGWGNISWGHAVSRDMVHWRHLPLAMVPEHWYDIEGVLTGSITVLPDGRVILLYTGNTETFAQVTCLAEAADPSDPLLREWVKHPANPVVYPPPGIGMKDYRDPTTAWFDNSDNTWRIIIGSKNDTDHSGIVFTYKTKDFVSYELIPGYLYRGPAGTGMYECIDMFAVGGGRKASDMYNSTAKDVLYVLKESSDDDRRDYYALGRFDAAANTWTPIDTERELGVALRYDYGRYDASKSFYDPVKERRIVWGYVVETDSWSADAAKGWANLQSIPRTVELDEKTRTNLIQWPVEELDTLRINTTDLSGITVGAGSVVSLPLHQTSQLDIEASFRINASAIEALNEVDVSYNCTMTSGAATRGALGPFGILVLANAALTEQTAVYFYVSKGLDGVLRTHFCHDELRSTHAIDVAKEVVGSTVPVLDGEDFSVRVLVDHSIVQSFVMGGRMTATSRAYPTEAIYAAAGVYLFNNATSATITAEKLIVHDMDSSYNRIFTDADLVVLD

SEQ ID NO: 30046 - protein, 275 aa, Streptococcus ferus
GAILVVASTDGPMPQTREHILLSRQVGVKHLIVFMNKVDLVDDEELLELVEMEIRDLLSEYDFPGDDLPVIQGSALKALEGDTAQEDVIMELMKTVDEYIPEPERDTDKPLLLPVEDVFSITGRGTVASGRIDRGTVRVNDEVEIVGIKDEITKAVVTGVEMFRKQLDEGLAGDNVGVLLRGVQRDEIERGQVLAKPGSINPHTKFKGEVYILTKEEGGRHTPFFNNYRPQFYFRTTDVTGSIELPAGTEMVMPGDNVTIDVELIHPIAVEQGTT

SEQ ID NO: 30047 - protein, 207 aa, Oryza sativa (japonica cultivar-group)
MRPGAEYAMVHGGGPAPAAVAAAGPSSSAVVASTASVAARSPWQSPVPYLFGGLAAMLGLIALSLLALACSYWKLAAAGGGGGGGQDGGEESRDGGGGGGGEKGSGGGGGGLAREWRDHVVVIMAGDERPTFLATPASSRAEPAAPDVAAAVCCSCGAASGSSSSSSTEVKTPAAAAAPEFLAGDGEPQAQSPSEQTSSSHSSVITS

SEQ ID NO: 30048 - protein, 275 aa, Streptococcus gordonii
GAILVVASTDGPMPQTREHILLSRQVGVKHLIVFMNKVDLVDDEELLELVEMEIRDLLSEYDFPGDDLPVIQGSALKALEGDSKYEDIIMELMNTVDEYIPEPERDTDKPLLLPVEDVFSITGRGTVASGRIDRGIVKVNDEIEIVGIKEEIQKAVVTGVEMFRKQLDEGLAGDNVGVLLRGIQRDEIERGQVIAKPGSINPHTKFKGEVYILTKEEGGRHTPFFNNYRPQFYFRTTDVTGSIELPAGTEMVMPGDNVTIDVELIHPIAVEQGTT

SEQ ID NO: 30049 - protein, 236 aa, Oryza sativa (indica cultivar-group)
MRSNGVIPLDYALFRPLPPNKEAVDANTLLHYTNVFDAVVDAAYFAMAYLNVTNVPVMVTETGWPHKGDPSNEPDATSDNADTYNSNLIRHVMNTTGTPKHPGVAVPTYIYELYDEDTRPGSTSEKYWGLFDMNGIPAYTLHLTGSGVLLANDTTNQTYCVAREGADEKMLQAALDWACGPGKVDCSALMQGQPCYDPDNVEAHATYAFNAYYHGMGMGSGTCYFSGVAVITTTDP

SEQ ID NO: 30050 - protein, 631 aa, Pseudoalteromonas tunicata D2
MTIEINVPDIGADAVEVTEILVKVGDTVVEDQSLLTVEGDKASMEVPASTSGVVKEIKIALGDKVTTGSLIMIFEGESQAAPAPVATAAPAAAPVSAATAQNVNVPDIGGDEVEVTAILVAVGDVVAEDQSILNVEGDKASMEVPAPFAGTVKEIKVATGDKVTTGSLVMVFDVAGAASVEVAVPVAAAAPVASASSEQNVCVPDIGGDQVEVTEILVAVGDVVKEDQSILNVEGDKASMEVPAPVAGTVKEIKVAVGDKVGTGSLVFVFEVAGSAPVAQAPVAQAPVAQAPTAAAPSAPAVQAVAPVQAAQAESFAENSAYAHASPVIRRLAREFGVNLANVKGSGRKGRVVKEDVQNYVKNLVKQVESGALSTSKGTTGGGELNLIPWPKVDFAKFGEVEEKKLSRIQKLSGANLHRNWVQIPHVTQFDEADITTLEEFRKEQNALAEKQKLGVKITPLVFVMKAAAKALVEFPTFNSSLSNDGESLILKKYVNIGVAVDTPNGLVVPVFKDVHKKGIIELSRELMDISKKAREGKLTAADMQGGCFTISSLGGIGGTAFTPIVNAPEVAILGVSKSDIKPKWNGKEFEPKLMVPLSMSYDHRVIDGALAARFTATLASYLSDIRQLVM

SEQ ID NO: 30051 - protein, 105 aa, Petunia x hybrida
MAKLVPIFLLALFVISMFATTVLASHDPKRGHHHKGYGPGSLKPSQCLPQCTRRCSQTQYHNACMLFCQKCCNKCLCVPPGFYGNKGVCPCYNNWKTKEGGPKCP

SEQ ID NO: 30052 - protein, 528 aa, Arabidopsis thaliana
MVIGAAARVAIGGCRKLISSHTSLLLVSSQCRQMSMDAQSVSEKLRSSGLLRTQGLIGGKWLDSYDNKTIKVNNPATGEIIADVACMGTKETNDAIASSYEAFTSWSRLTAGERSKVLRRWYDLLIAHKEELGQLITLEQGKPLKEAIGEVAYGASFIEYYAEEAKRVYGDIIPPNLSDRRLLVLKQPVGVVGAITPWNFPLAMITRKVGPALASGCTVVVKPSELTPLTALAAAELALQAGVPPGALNVVMGNAPEIGDALLTSPQVRKITFTGSTAVGKKLMAAAAPTVKKVSLELGGNAPSIVFDDADLDVAVKGTLAAKFRNSGQTCVCANRVLVQDGIYDKFAEAFSEAVQKLEVGDGFRDGTTQGPLINDAAVQKVETFVQDAVSKGAKIIIGGKRHSLGMTFYEPTVIRDVSDNMIMSKEEIFGPVAPLIRFKTEEDAIRIANDTIAGLAAYIFTNSVQRSWRVFEALEYGLVGVNEGLISTEVAPFGGVKQSGLGREGSKYGMDEYLEIKYVCLGDMNRH

SEQ ID NO: 30053 - protein, 181 aa, Brassica napus
MASSMLSSAAVATSPAQATMVAPFTGLKSSAAFPVTRKSNTDITSIANNGGRVSCMKVWPPVGKKKFETLSYLPDLTDVELAKEVDYLLRNKWIPCVEFELEHGFVYREHGSTPGYYDGRYWTMWKLPLFGCTDSAQVLKEVQECKTEYPNAFIRIIGFDNNRQVQCISFIAYKPPSFTGA

SEQ ID NO: 30054 - protein, 322 aa, Ashbya gossypii ATCC 10895
MSGMGESRTELLGWLNDLLRLDYTKVEQCGTGAAYCQIMDSIYGDLPMHRVKFDARAEYESLTNFKILQSCFTKHKIEKTVFVDRLIKCRFQDNLEFLQWMRRFWIQNKDESPYDPESRRKSVRPVSMRAPAQAPPSHAPKRRSLATFAATGTAAAPRPLQKARAAAGGAGGAVATRVPSGGAPARGTATAGAGEQVAALQGELSAAEHKINKLTQEMVQYQDAMSLMERERDFYFGKLRDIEILVQSTQDLFKEGVYNDDPQELNRLLGKVSQILYSTEEGFEVANGADGNEEYDVEAGTRMENCVEGQVLHNLITDDETF

SEQ ID NO: 30055 - protein, 281 aa, Medicago truncatula
MYRENGLLFPWSYLHNFSQELHQLEDYCRNQKFNASMSDLVQFSAMSEYDFAAEGDLFKAPEPMIEESGIDLDPMTAAISMISCGEDVKSTDISILQNEQLLSDVFYDCKKDLFEKAGMESPLSEILEIKVPLLNIDENIIQENKPLPDMPLLLKSVSSGSLSSMDWMHGSAAMKPAFLGISGIDFDAVYGMRRSFSEGDIKTFGNANMNVVQSPVERPFFTSNCSSEERLQKLSRYRNKKTKRNFGRKIKYACRKALADSQPRVRGRFAKNEETDQAKKE

SEQ ID NO: 30056 - protein, 522 aa, Candida albicans SC5314
MLSRRTITRKLNKGVSKSLLSFARYNHSITSTTTPASSQPHIELTTFANGLRLITDSTPGHFNAVGAYIDAGSRYEDPKAPGLSYLRDRLSWKSTEDFTGQQMLENLSKLGGNYMSSAQRESMIYQASVFNKDIDRMVGMIGQTIRYPIFSDQEFQEALQTAEYEVAELAYKSDLYLPEELHTVAYKENTLGLPLFIPQERIPLVSKSDVIDYNNKFFQPQNTVIAMVGVPHEYALKLIMENFGDWANTTTTKPNPGIKNYTGGEISLPYTPPLYANLPELYHIQIGFETTGLLNDDLYALATLQKLLGGGSSFSAGGPGKGMFSRLYTKVLNKYPFVENCMSFNHSYIDSGIFGITLSLVPEAAHVSSQIIAHELSQLLVTEESQGGMNAKEVQRAKNQLISSLLMNVESKLARLEDLGRQIQCQGKITTIDEMVDKINRLTIKDLQNVAEKVLTGKVITSNGGTSLGLPSIVMQGERETFGDVEFILRRYGLGNYKGPEITEPRDFSSNQNEKKKKSRWF

SEQ ID NO: 30057 - protein, 486 aa, Streptococcus pyogenes MGAS10394
MKFTIITNYDTLSRKSFTIEGDNMTIFRKKKKYSNKTEMQRHFKVIDLVFLGLGSMVGTGIFTVTGIGAAKYAGPALTISIIISAIAIGILALFYAEFASRMPSNGGAYSYVYATLGEFPAWLVGWYIIMEFLTAISSVAVGWGSYLKGLLANYNIVLPNALNGTFNLKNGTYIDILPVLVMFFVTGIVLMNSKLALRFNSFLVILKFSALALFIFVGIFFIDHNNWSHFAPYGVGQITGGKTGIFAGASVMFFAFLGFESISMAVDEVKEPQKTIPKGIILSLIIVTALYIVVTTILTGIVHYTKLNVPDAVAFALRNIRLYWAADYVSIVAILTLITVCISMTYALARTIYSISRDGLLPKSLYTLTKKNKVPQNATLVTGLLAMICAGIFPLSSLAEFVNICTLAYLIILSGAIIKLRRIEGEPKANEFKTPLVPFLPMLAIIICLSFMSQYKAFTWIAFAIATIIGTLIYLAYGYTHSIENK

SEQ ID NO: 30058 - protein, 305 aa, Zea mays
  misc_feature (226)..(226): Xaa can be any naturally occurring amino acid
SKPTRYSFSELKKITRRFKEKVGQGGFGSVYKGELPNGVPVAIKMLENSIGEGEEFINEVATIGLIHHANIVRLLGFCSEGTRRALIYEYMPNESLEKYIFSNDSSISQDLLVPKKMVDIALGIARGMEYLHQGCNKRILHFDIKPHNILLDFNFNPKISDFGLAKLCARDQSIVTLTAARGTMGYMAPELYSRNFGGVSYKSDVYSFGMLVLEMLSGRRTSDPRXDSQNDVYLPEWIFERVITGQDLVLSREMTAAEKEKVKQLAMVALWCIQWNPKNRPSMTKVVNMLTGRLENLQMPPKPFV

SEQ ID NO: 30059 - protein, 538 aa, Gloeobacter violaceus PCC 7421
MFQDRLIIFDTTLRDGEQSPGATLNADEKVEIARQLARLGVDVIEAGFAYASPGDFEAVERVARTVGTEDGPVICSLARAIRSDIQAAAEAIRPAARGRIHTFISTSDIHLEHQLRKSRAEVLAIAAEMVAFAKGFVDDVEFSPMDAGRSAPEYLYRVLEAAIAAGATTVNIPDTVGYLTPAEFGGLIRGITQNVRGIERAVISVHCHNDLGLAVANSLAAIENGARQIECTVNGIGERAGNCSLEEIVMALHVRRQFFNPIFGRPADSTVPLSTIDTRQIYKSSRLVSHLTGMLVQPNKAIVGANAFAHESGIHQDGVLKNRLTYEIMDAETVGVNENRIVLGKHSGRNAFRTRLVELGYELGDADLNRAFLRFKELADKKKTVSDWDIEAVISDEIRLIPEAYRLEQVQVSCGEPGLPTATVRLTGPDGVERVDAAVGTGPVDAVYKAINRLIELPNELIEFSVQSVTAGIDAMGEVTIRVRQDGRTFSGHAANTDIIVASARAYLNALNKLHFALAHPTHSGGALAHPDAAAQKL

SEQ ID NO: 30060 - protein, 575 aa, Zea mays
  misc_feature (35)..(35): Xaa can be any naturally occurring amino acid
MAERLTRIAIVSEDKCKPKKCRQECKKSCPVVKTXCPFDAIEIINLPKDLEKDTTHRYGPNTFKLHRLPVPRPGQVLGLVGTNGIGKSTALKVLAGKLKPNLGRFKNPPDWQEILTYFRGSELQNYFTRILEDNLKAIIKPQYVDHIPKAVQGNVGQVLEQKDERDMKSELCVDLELNQVIDRNVGDLSGGELQRFAIAVVAVQNAEIYMFDEPSSYLDVKQRLKAAQVVRSLLRPNSYVIVVEHDLSVLDYLSDFICCLYGKPGAYGVVTLPFSVREGINIFLAGFVPTENLRFRDESLTFKIAETQENAEEIETYQRYKYPTMSKTQGNFKLTVVEGEFTDSQIVVMLGENGTGKTTFIRMLAGLLKPDTVEGTDIEIPEFNVSYKPQKISPKFQNTVRHLLHQKIRDSYMHPQFVSDVMKPLQIEQLMDQEVVNLSGGELQRVAICLCLGKPADIYLIDEPSAYLDSEQRIVASKVIKRFILHAKKTAFIVEHDFIMATYLADKVIVYEGRPSIDCTANAPQSLVSGMNKFLSHLDITFRRDPTNYRPRINKLESTKDREQKSAGSYYYLDD

SEQ ID NO: 30061 - protein, 620 aa, Triticum aestivum
MGSHGKPPLPYAYKPLPSGAAADADGERTGWTRWRVCATVLTASAMVVVVVGATLLAGFRVDQAVDEEAAAGFPWSNEMLQWQRSGYHFQTAKNYMSDPNGLMYYNGWYHMFFQYNPVGTDWDDGMEWGHAVSRNLVTWRTLPIAMVADQWYDILGVLSGSMTVLPNGTVIMIYTGATNASAVEVQCIATPADPNDPFLRRWTKHPANPVIWSPPGIGTKDFRDPMTAWYDESDDTWRTLLGSKDDHDGHHDGIAMMYKTKDFLNYELIPGILHRVQRTGEWECIDFYPVGHRSNDNSSEMLHVLKASMDDERHDYYSLGTYDSAANAWTPIDPELDLGIGLRYDWGKFYASTSFYDPAKKRRVLMGYVGEVDSKRADVVKGWASIQSVPRTIALDEKTRTNLLLWPVEEIETLRLNATELSDVTLNTGSVIHIPLRQGTQLDIEATFHLDASAVAALNEADVGYNCSSSGGAVNRGALGPFGLLVLAAGDRRGEQTAVYFYVSRGLDGGLHTSFCQDELRSSRAKDVTKRVIGSTVPVLDGEAFSMRVLVDHSIVQGFAMGGRTTMTSRVYPMEAYQEAKVYLFNNATGASVMAERLVVHEMDSAHNQLSNMDDHSYVQ

SEQ ID NO: 30062 - protein, 465 aa, Sulfitobacter sp. EE-36
MAIEILMPALSPTMEEGTLAKWLVKEGDTVSSGDIMAEIETDKATMEFEAVDEGTIGKILIDAGTEGVKVNTPIAVLLEDGEDASDIDSASSAAPAEQTKADDSEDAKSDKAPAAAKPDAEAPKAPETDTTPDWPEGTKLKQQTVREALRDAMAEEMRRDEDVFLMGEEVAEYEGAYKISQGLLDEFGAKRIIDTPITEHGFAGIGVGAAFGGLRPIVEFMTWNFAMQAIDHILNSAAKTLYMSGGQMGAPMVFRGPNGAAARVGAQHSQDYAAWYMQIPGLKVAMPYSASDAKGLMKTAIRDPNPVVFLENEIMYGKSFDVPDVDDYTVPFGKARIWREGTDVTIVSFGIGMTYALEAAEKLAEEGIDAEVIDLRTLRPMDTASIIKSVMKTNRLVTVEEGWPQGSVGNYISSVIMQEAFDYLDAPVINCTGKDVPMPYAANLEKLALVTTDEVIAAVKKVTYK

SEQ ID NO: 30063 - protein, 428 aa, Leptospira interrogans serovar Lai str. 56601
MKQDSQSENESIVCDLSVSEDQRNVKFFSDLQTPIPKHLPFFMDVTLRDGNQALRRPWNLEQKETIFKQLLKLGVQGIEVGFASSNNQEFEACKYLSSIAPDNVVISSLSRAVEKEIEVSWKAIRFAPKPRIHIVYPVSAFTIQNVLKISPEKVLDRISQSVAYAKSLVGSKGEVQFSGEHFGDSLENLDFAAEAFQIALNNGADVVNLPNTVERYRPWLFVSMVKAVANLLPEDTRISIHTHNDLGMATATTVESYFAGAVQLETALNGLGERAGNTNTYEVAIALHNCGVEVPLNFSTIYETSRLVSYLSEIPIYEKAPLIGEDVISHRSGIHQDGVAKTRHLQKGAYRAFDAALIGRPEGDRIEFTNQSGKSAVYCILKDAGENITLEEAGRLQPILKKISEDLGRRELTLEEIRIEWNRLLRAI

SEQ ID NO: 30064 - protein, 266 aa, Streptococcus intermedius
VVASTDGPMPQTREHILLSRQVGVKYLIVFMNKVDLVDDEELLELVEMEIRDLLSEYDFPGDDIPVIQGSALKALEGDEKYEDIIMELMNTVDEYIPEPERDTDKPLLLPVEDVFSITGRGTVASGRIDRGTVKVNDEVEIVGIREEIQKAVVTGVEMFRKQLDEGLARDNVGVLLRGIQRDEIERGQVLAKPGSIHPHTKFKGEVYILTKEEGGRHTPFFNNYRPQFYFRTTDVTGSIELPAGTEMVMPGDNVTIDVELIHPIAV

SEQ ID NO: 30065 - protein, 332 aa, Listeria innocua
MPNEVYDVTIIGGGPIGLFSAFYSGLRSMKTKIIDAEPDVGGKVRYFFPEKIIRDIGGIPAITGANLVANLKEQAETFHPTIVCNERVVDVTKLTDGVFQLTSHNGSIHFSKTVVIATGSGTFEVNKLEAMHVDDFPLAINYDVKNLEQFRDKIVTVSGGGNSAIDWAQTLEPIAKKVHLIYRGEDFKAHEESVRELKNSRVEIHIHHEIKELIGANNQLASIKICCNQTQVTKTIETEALFINHGVKVDLGTMAEWGFELADFGIVVDDEMKTTVPGIFACGDSATYSRKIRIIAAGLHEGPIAINSAKKYLEPTARDEAMISTHHESFIG

SEQ ID NO: 30066 - protein, 243 aa, Pinus pinaster
MAAHLPLFVKGSIFSLPSSTSTSSSCTYSSISHTAASPGFHSSPAAANKSVKLGTMQRMDGVRSVKHRMTSLHAKMEKRQQIKASAQAPNGTNTHPDYVPEANFYKVEAILRPWRISHVTTGLLKMGIRGVTVSDVRGFGVQAGSAERQAGSEFSKDNFVSKVKMEIVVSKDQVEAVIDAIIDEARTGEIGDGKIFVVPVADVIRVRTGERDLKPERMAGGDQRYLQVYIKRLQTATKSLLAL

SEQ ID NO: 30067 - protein, 227 aa, Haemophilus somnus 2336
MELVFIRHGFSEWNAKNLFTGWRDVNLTERGIEEAKAAGKKLLEAGYEFDIAFTSVLTRAIKTCNIVLEESNQLWIPQVKHWRLNERHYGALQGLDKKATAEQYGDEQVHIWRRSYDVSPPDLDPQDPNSAHNDRRYALLPKDVVPNAENLKITLERVLPFWEDQIAPALLSGKRVLVTAHGNSLRALAKHIIGISDEEIMAFEIPTGQPLVLKLDEQLNFVEKFYL

SEQ ID NO: 30068 - protein, 340 aa, Prochlorococcus marinus subsp. pastoris str. CCMP1986
MTLRVAINGFGRIGRNFMRCWLSRGAYTNIEVVGINVTSDPKTNAHLLKYDSVLGKLDGVDIQYTDDTFVINNKTIKCFSDRNPMNLPWKDWGVDLVIESTGVFNTDIGASKHLEVGAKKVILTAPGKGSGVGTYVVGVNADQYKHSDYDILSNASCTTNCLAPVVKVLDQTFGINKGLMTTIHSYTGDQRILDNSHRDLRRARAAATNIVPTSTGAAKAVALVYPEMTGKLTGIAMRVPTPNVSAVDFVFESSKSVTSQEVNNALKESSLGSMKGIIKYGDEPLVSSDYAGTNESSIVDSDLTMSIGDNLVKVLAWYDNEWGYSQRVVDLAEIVAQKWE

SEQ ID NO: 30069 - protein, 356 aa, Ananas comosus
MAWKVQLVFLFLFLCVMWASPSAASADEPSDPMMKRFEEWMVEYGRVYKDNDEKMRRFQIFKNNVNHIETFNSRNKDSYTLGINQFTDMTNNEFVAQYTGGISRPLNIEREPVVSFDDVDISAVPQSIDWRDYGAVTSVKNQNPCGACWAFAAIATVESIYKIKKGILEPLSEQQVLDCAKGYGCKGGWEFRAFEFIISNKGVASVAIYPYKAAKGTCKTNGVPNSAYITGYARVPRNNESSMMYAVSKQPITVAVDANANSQYYNSGVFNGPCGTSLNHAVTAIGYGQDSNGKKYWIVKNSWGARWGEAGYIRMARDVSSSSGICGIAIDSLYPTLESRANVEAIKMVSESRSSV

SEQ ID NO: 30070 - protein, 275 aa, Streptococcus macacae
GAILVVASTDGPMPQTREHILLSRQVGVKNLIVFMNKVDLVDDEELLELVEMEIRDLLTEYDFPGDELPVIQGSALKALEGDTKYEDIIMELLDTVDDYIPEPQRDTDKPLLLPVEDVFSITGRGTVASGRIDRGTVKVNDEVEIVGIRDDIQKAVVTGVEMFRKQLDEGLAGDNVGVLLRGIQRDEIERGQVLAKPGSIHPHTKFKGEVYILTKEEGGRHTPFFNNYRPQFYFRTTDVTGSIDLPAGTEMVMPGDNVTIDVELIHPIAVEQGTT

SEQ ID NO: 30071 - protein, 269 aa, Streptococcus mitis
ILVVASTDGPMPQTREHILLSRQVGVKHLIVFMNKVDLVDDEELLELVEMEIRDLLSEYDFPGDDLPVIQGSALKALEGDTKYEDIVMELMNTVDEYIPEPERDTDKPLLLPVEDVFSITGRGTVASGRIDRGIVKVNDEIEIVGIKEETQKAVVTGVEMFRKQLDEGLAGDNVGVLLRGVQRDEIERGQVIAKPGSINPHTKFKGEVYILTKEEGGRHTPFFNNYRPQFYFRTTDVTGSIELPAGTEMVMPGDNVTIDVELIHPIAVE

SEQ ID NO: 30072 - protein, 263 aa, Frankia sp. CcI3
MERVIVTVVPQPPRRCRSSTPCCNAPMATFGAVRRHRERHSTNRSGWLRAAVLGANDGLVSTSSLIVGVAASGASTGAVLTAGIAGLTAGAMSMAAGEYVSVSSQADVERADRAKESAELAADPVAELAELVGIYERRGLPRDLATQVAVTLTERGALEAHLRDELGQSEATRARPVQAAVASAGSFTAGGLVPFLGMSAPAGAGRLMLVVVVTVIGLAVAGILAARAAGMALLRPTLRVVLGGAAAMLVTALVGLITDAAGG

SEQ ID NO: 30073 - protein, 801 aa, Bacillus cereus E33L
MKKRLVMIGNGMAGIRCMEEILKHDCDSYEITIFGDEPHPNYNRIMLSHVLQGKTNIQNIIMNEYSWYEENEITLYTNERVQSIDREEKVIITEKNRTLTYDKLIIATGSSAFILPVEGSTLPGVTGFRTIEDTQFMMDTAKEKKKAVVIGGGLLGLEAARGLIDLGMDVHVVHLMPSLMEQQLDTKAASLLREDLEAQGMKFLMEKKTVKILGTNHVEGIQFEDGEVVDCDLIVMAVGIRPNTQIARDAGLIVNRGIVVNDYMLTNDESIYAVGECAEHDGIAYGLVAPLYEQGAILAKHISNLQTDGYSGSIVGTQLKVAGCDLFSAGQIYEDDQTKAISIFNECKRSYKKVLIRDNKVVGIVLYGDTADGTRLFSMLKKEEDIQEYTPASILHKAGEEIELDVATMSADDTICGCNGVTKGTIVHAILEQELTTFEEVKGCTKAAGSCGKCRPLVEQVLSHTLGDAFDASAQSAGMCGCTPLSRDEVVAAIHEKGLKSPKEVRNVLGFVHEDGCSKCRPALNYYLRMAIPEEYEDDKASRFVNERMNGNIQHDGTFSVIPRMYGGVTTADDLMKIAEVAKKYDVPLVKITGASRIGLYGVKKQDLPNVWADLNMTSGYAYSKSLRNVKSCVGSRFCRFGTKDSLGLGMLLEQSLEMVDTPHKMKMGVTGCPRNCAEVLTKDFGVVCVENGYQLYIGGNGGTEVREADFVMIVPTEDDVLHIATAYMQYYRETGIYGERTAYWTERLGFDHIKEILQDANMVTKLNERFQTARGTYKEAWGQALETKSLKAMYEVETVK

SEQ ID NO: 30074 - protein, 274 aa, Streptococcus parasanguinis
AILVVASTDGPMPQTREHILLSRQVGVKHLIVFMNKVDLVDDEELLELVEMEIRDLLSEYDFPGDDLPVIQGSALKALEGDSKYEDIIMELMDTVDEYIPEPERDTDKPLLLPVEDVFSITGRGTVASGRIDRGVVRVNDEIEIVGIKEEIQKAVVTGVEMFRKQLDEGLAGDNVGVLLRGIQRDEIERGQVIAKPGSINPHTKFKGEVYILTKEEGGRHTPFFNNYRPQFYFRTTDVTGSIELPPGTEMVMPGDNVTIDVELIHPIAVEQGTT

SEQ ID NO: 30075 - protein, 90 aa, Prochlorococcus marinus str. MIT 9313
MAISVTSACPQSTINELGIRQWPIWTCEASTFPWTYAEQETCLLLEGEVTVKPEGGKPVRFGAGDLVVFPAGMSCIWEVHQAVRKHYRFG

SEQ ID NO: 30076 - protein, 237 aa, Wolbachia endosymbiont of Onchocerca volvulus
IEEIMEHIKDSHMLFITAGMGGGTGTGAAPVIAKAAREARAAVKDKMLKEKKILTVGVVTKPFDFEGVRRMRIAELGLEELQKYVDTLIVIPNQNLFRIANEKTTFADAFRLADNVLHIGIRGVTDLMVMPGLINLDFADIGTVMNEMGKAMIGTGEAEGEDRAVTAAEAAISNPLLDNMSMKGAQGILINITGGEDMTLFEVDAAANRVREEVDEDANIIFGATFDQAMEGKVRVS

SEQ ID NO: 30077 - protein, 567 aa, Medicago truncatula
MDFDEYEYLEKTVEEQPEDKDSSKKKNTDITDIKSERTYRKHGIDDDLDGGEDRRSKRSRGGDDENGSKKDRDRDRDRERDREHRERSSGRHRERDGERGSREKEREKDVERGGRDKERDREREKERERRDKEREKERERRDKEREKERAEREKEEKERPRRSMSRPERDRGERDFENRDGRRFRDKKENVEPEADPERDQRTVFAYQMPLKATERDVYEFFSKAGKVRDVRLIMDRNSRRSKGVGYIEFYDAMSVPMAIALSGQLLLGQPVMVKPSEAEKNLVQSNASSGAAVVGPYGAVDRKLYVGNLHFNMTEANLREIFEPFGQIEVVQLPLDMETGHCKGFGFVQFAHLEHAKAAQSLNGKLEIAGRTIKVSSVTDHVGSQDTTTKSADFDDDEGGLTLNAHSRALLMQRLAGTDITTSIGVPTVNGSVPVQQAFSMPFGNPGVIPASVLPTQVMPTPVAEPVGIPSECLLLKNMFDPSTEIEPDFDIDIKEDVEEECSKYGRVMHIYVDKRSAGFVYLQFETVEASSAAQRAMHMRWFARRLITAIFMQPHLYEAKFKDES

SEQ ID NO: 30078 - protein, 326 aa, Rickettsia rickettsii
MQITVREALRDAMQEEMIRDDKVFVIGEEVAEYQGAYKVTQGLLERFGPKRVIDTPITEYGFAGLAVGAAFAGLRPIVEFMTFNFAMQAFDHIVNSAAKTHYMSGGQVKCPIVFRGPNGAASRVAAQHSQNYTACYSHIPGLKVVAPYSAADHKGLMLTAIRDDNPVVFLENEILYGHSFDVPQTIEPIPFGQAKILREGSSVTIVTFSIQVKLALDAANVVQNDNIDCEVIDLRTIKPLDTETIIESVKKTNRLVVVEEGWFFAGVGASIASIVMKEAFDYLDAPIEIVSGKDLPLPYAVNLETLALPSESDVIEAVKKVCYYSI

SEQ ID NO: 30079 - protein, 156 aa, Triticum aestivum
  misc_feature (116)..(116): Xaa can be any naturally occurring amino acid
MAAVLNSRKTPQAVVAVLVAAALLASSASAAITCGQVGSSLAPCIPYATGRASALPASCCSGVKSLNSAARTSADRQAACRCLKSLANSVKSVNMGTVATIPGKCGVSVGFPISMXTDCNKIAKLRRQANKLPNYTYSARCTNGRINKCMQDTSSK

SEQ ID NO: 30080 - protein, 563 aa, Oryza sativa (japonica cultivar-group)
MGLEEGGAMRALMRRKQVDSDRVRAAGGHQLAKELSVTQLVAIGVGSTIGAGVYVLVGTVAREHAGPALTLSFLIAGVAAALSAFCYAELASRCPSAGSAYHYSYICVGEGVAWLIGWALILEYTIGGSAVARGISPNLALFFGGQDSLPWFLARHELPWFDVVVDPCAAFLVLVVTALLCKGIKESSFVQGVVTVLNCFVMLFVIIAGSYIGFQTGWVGYKVAGGFFPYGANGMLAGSATVFFAYIGFDSVASTAEEVKNPQRDLPLGIGTALSVCCSLYMLVSVVIVGLVPYFAMDPDTPISSAFARHGMHWAMYLVTTGAVLALCSTLMGSILPQPRILMAMARDGLLPSFFSDVNQRTQVPVKSTIVTGICAACLAFFMDVSQLAGMVSVGTLLAFTIVAVSILILRYAPPDEVPLPSSLEASFRLSQEYDEEKVRGPPVDANHEQLSSVVESINDTLIEKKQDTSVEESKRRKAAVCSISSVCVGVVVLTTSASFTFLPFLLRCFFCVFGGLLLLAGLGVLCYIDQDDGRHSFGHSGGTYITTHLCTLSTLDSIDEIT

SEQ ID NO: 30081 - protein, 603 aa, Cryptococcus neoformans var. neoformans JEC21
MSDKLTRVAIISDDKCKPKRCRQECKRSCPVVKMGKLCIEVNPNDKKAFISEELCIGCGICVKKCPFDAIQILNLPTNLESHVTHRYAANAFKLHRLPTPRPGQVLGLVGTNGIGKSTALKIMSGKLKPNLGRYDDPPEWQEILKHFRGSELQNFFTKVLEDDIKAVTKPQYVDQIPRSIKVPNMTVGKMFDRQSELPNRDGLEKDLELKHLQSREVSQLSGGELQRFAIGIASVRKADVYMFDEPSSYLDIRQRLAAARVIRGLVNATNYVIVVEHDLATLDYLSDFICVLYGVPGTYGVVTMPYSVREGINIFLDGMIPTENLRFRDESLTFKISETVDELQAPKTRRYQYPSMTKTLGNFKLHVDEGEYSDSEILVMLGENGMGKTTLVQLLGGKMEPDESKDKVSLRVSMKPQTISPKFPGSVRMLLLKRIKGAFMHPQFNSDVMKPMNLEPIMDQDVQTLSGGELQRVAICLVLGVPADVLLIDEPSAYLDSEQRIVASKVIKKFVMSSKRTAFIVEHDFIMATYLADRVIVFDGQPGKESWARKPEGLLTGMNKFLKSLDITFRRDPTNFRPRINKMDSLKDKEQKAEGAYFFVDSD

SEQ ID NO: 30082 - protein, 345 aa, Methanosarcina mazei
MHHNVFTNTPTIPIDVKDRSVSELMDGMLRTGFQGRKLAESVQAWSNMLKEKDTTVLMGLSGAMVPAGMRRVISYLIRERMIDCLVSTGANLFHDSHEALGRKHYVGSHLANDEKLFEHGVDRIYDVFAVEEEFRNADNLIADFAEEIGEISCSSREFMYLLGKELVRRGAAEDSIVVSAYRHNVPIFVPALSDSSIGIGLTIARRRGLKLEIDQIKDVDEITQIVEKSGHTGVVYVGGGVPKNFIQQTEVIASILGMDVPGHEYAIQYTSDSPHWGGLSGCTFDEAVSWGKVAAQAKKVQVFVDATIALPIVAHALHEKTRGVKRTAPVFSWDGPEGLEIAYNE

SEQ ID NO: 30083 - protein, 505 aa, Oryza sativa (japonica cultivar-group)
MGLEEGGAMRALMRRKQVDSDRVRAAGGHQLAKELSVTQLVAIGVGSTIGAGVYVLVGTVAREHAGPALTLSFLIAGVAAALSAFCYAELASRCPSAGSAYHYSYICVGEGVAWLIGWALILEYTIGGSAVARGISPNLALFFGGQDSLPWFLARHELPWFDVVVDPCAAFLVLVVTALLCKGIKESSFVQGVVTVLNCFVMLFVIIAGSYIGFQTGWVGYKVAGGFFPYGANGMLAGSATVFFAYIGFDSVASTAEEVKNPQRDLPLGIGTALSVCCSLYMLVSVVIVGLVPYFAMDPDTPISSAFARHGMHWAMYLVTTGAVLALCSTLMGSILPQPRILMAMARDGLLPSFFSDVNQRTQVPVKSTIVTGICAACLAFFMDVSQLAGMVSVGTLLAFTIVAVSILILRYAPPDEVPLPSSLEASFRLSQEYDEEKVRGPPVDANHEQLSSVVESINDTLIEKKQDTSVEESKRRKAAVCSISSVCVGVVVLTTSASFTFLPL

SEQ ID NO: 30084 - protein, 338 aa, Blumeria graminis f. sp. hordei
MAPIKVGINGFGRIGRIVFRNAAQSCEVEVVAVNDPFIEPEYAAYMLKYDSTHGQFNGDIQTVEDGLVVNSRNVKFYNKRNPEEIPWAETGAEYIVESTGVFTTTEKAKAHLKGGAKKVIISAPSADAPMFVMGVNHKSYTTDLEVISNASCTTNCLAPLAKVINDEFTIIEGLMTTIHSYTATQKTVDGPSAKDWRGGRTAAQNIIPSSTGAAKAVGKVIPALNGKLTGMAMRVPTANVSVVDLTCRIEKSATYDEIKKAIKIAAGNELQGILSYTEDEIVSTDLIGNNHSSIFDAKAGISLNDNFVKLVAWYDNEWAYSRRVIDLISYIAGKDGSK

SEQ ID NO: 30085 - protein, 417 aa, Solanum tuberosum
MQNQRLKQQQQQALMQQALLQQQSLYHPGLLAPPQIEPIPSGNLPPGFDPSTCRSVFVGNIHPQVTEPLLQEVFSSTGLVEGCKLIRKEKSSYGFIHYYDRRSAALAIVSLNGRHLFGQPIKVNWAFASGQREDTSSHFNIFVGDLSPEVTDAMLFACFSVYPGCSDARVMWDQKTGRSRGFGFVSFRNQQDAQSAINDLTGKWLGSRQIRCNWATKGANSNDDKQSSDAKSVVELTNGSSEDGKEAANSDAPENNPQYTTVYVGNIAPEVTQLDLHRYFHALGAGVIEEIRIQRDKGFGFVRYNTHAEAALAIQMGNTHSVLGGRQIKCSWGNKPTPPGTTSNPLPPPAPTPLGISATDLLAYERQLAMSKMGGVPGLMGQYPLKQASMGMASGASQAIYDGGFQNVAAQQLMYYQ

SEQ ID NO: 30086 - protein, 191 aa, Triticum aestivum
  misc_feature (16)..(16): Xaa can be any naturally occurring amino acid
PRPQGGEKEPQAPPVXKWEPTVEGYLRFLVDSKLVFQTLEEIVDRAAVPWYAEFRNTGLERSEPLKKDLEWFTEQGHTIPEPTAAGTAYASYLEELSEKDPQAFICHFYNVYFAHTAGGRMIGKKVAEKILDKKELEFYKWEGTLSQLLQNVRITLNQVASSWSREEKDHCLEETEKSFAYSGDLLRQIFT

SEQ ID NO: 30087 - protein, 252 aa, Ashbya gossypii ATCC 10895
MVVHHYHCLSSCSSSPEKISRNAQTNFTTEQPIDLQSDMSLGILSHVDGSSKFSTAAASAICGVSGPIEPKARQEIPQHLALDVIVRPAAGPPTTREKLLEDKVRATITPVVETFLHPRQLCQITLQVLKSVGQHEHMELAVALNAAYLALLDAGVPLRAVLSAVSIAVSTEGELTQNPSPAELQDARSVFTAAFSVADGVNTLLLLDGNGTFEESTVSKVLELAEKECVRLAGELRHAVKEKLEKDFIWKK

SEQ ID NO: 30088 - protein, 336 aa, Pyrococcus furiosus
MPKPKEYVLKKSEEIEGTKVEGPWLDDTKSLEEVVSLYTQIGFQATHLGKAIEIWRKIEEKREKGEEIRVFLGYTSNIVSSGLREIIAWLVKHRKVDVIVTTAGGVEEDFIKALKPFILGDWIVNDAELRKKGINRIGNIFVPNDRYIEFEKYMIPFFERILEIEREKGRPLTASEFIYELGRFMDEKLGKEKEKSIIYWAYRNEIPIFCPAITDGSIGDMLYFFKEERRDRELIIDIANDIVKLNNLAVTAKETASIILGGSLPKHAIINANLFRGGSDYAIYITTAVPWDGSLSGAPPSEGVSWGKIRAKADYVEIWADATLVFPILVWMVMKR

SEQ ID NO: 30089 - protein, 634 aa, Ustilago maydis 521
MLRSSNRHMAATLRYAASTEWYQAAAFTEGLAGPSVARRAGSASRHSSSRHRSSLRKGLTAPFSTSSCTARSSQLADHRIISDPFPNQDTGFSYEKRDQLGLRGLLPPAKQSLNTQVLRVLHQLRSKSTPLEKHVMLASLRQTNTRLYYATILANKEEILPLIYTPTVGEACQKFSHIYRRPEGLSISLEDKGKIASIVENWPVPAGSPRIAVITDGSRILGLGDLGWNGQGISIGKLSLYVAGAGIHPRATLPIVVDLGTNNKKNLEDPLYLGLRRERASTEEYIEFMDEVMHALHTRYPNLIIQFEDFTSENAFRFLERYQGKYPMFNDDIQGTGSVILAGFTNAARIASKESGRPLHDHRILMAGAGSAAVGVGKQLMSFFTRQGLSADEARERIFITDSKGLVTKDRGDKLAEHKVFFARDDNAGKQIKDLGEIIDYVKPTAILGLSTIKGTFDENVIRKMATLNKRPIIFPLSNPTDNSECTFEEAVKYTEGRVLFAAGSPFAEIDAASSPTGKRMIPGQGNNFLVFPGIGLCAALCKAGRVTNEMITESALALSDALTDQERAEGRLYPNTERIREISRDIAVKCIQMANKQGVTRDGGKTAAMDEEQLRDWVQGEMWTPKYDTAEDA

SEQ ID NO: 30090 - protein, 99 aa, Escherichia coli
QLMRRLRQLIAQSWHIDEIRKLRPSPVDEAKWGFAVVENSLWQGVPNYLRELNEQLEENLGYKLPVEFVPVRFTSWMGGDRDGNPNVTADITRHVLLLS

SEQ ID NO: 30091 - protein, 357 aa, Ananas comosus
MASKVQLVFLFLFLCVMWASPSAASRDEPSDPMMKRFEEWMAEYGRVYKDNDEKMRRFQIFKNNVNHIETFNSRNGNSYTLGINQFTDMTNNEFVAQYTGVSLPLNIEREPVVSFDDVDISAVPQSIDWRNYGAVTSVKNHIPCGSCWAFAAIATVESIYKIKRGYLISLSEQQVLDCAVSYGCDGGWVNKAYDFIISNKGVASAAIYPYKASQGQGTCRINGVPNSAYITGYTRVQSNNERSMMYAVSNQPIAASIEASGDFQHYKRGVFSGPCGTSLNHAITIIGYGQDSSGKKFWIVRNSWGASWGERGYIRMARDVSSSSGLCGIAIRPLYPTLQSGANVEVIKMVSESRSSV

SEQ ID NO: 30092 - protein, 827 aa, Haemophilus influenzae 86-028NP
MNLSRRDFMKANAAMAAATAAGLTIPVKNVVAAESEIKWDKAVCRFCGTGCAVLVGTKDGRVVASQGDPDAEVNRGLNCIKGYFLPKIMYGKDRLTQPLLRMTNGKFDKNGDFAPVSWDFAFKTMAEKFKEAFKKNGQNAVGMFSSGQSTIWEGYAKNKLWKAGFRSNNVDPNARHCMASAAVAFMRTFGMDEPMGCYDDIEQADAFVLWGSNMAEMHPILWSRITDRRISNPDVRVTVLSTYEHRSFELADHGLIFTPQTDLAIMNYIINYLIQNNAINWDFVNKHTKFKRGETNIGYGLRPEHPLEKDTNRATAGKMHDSSFEELKQLVSEYTVEKVSKMSGLDKVQLETLAKLYADPTKKVVSYWTMGFNQHTRGVWVNQLIYNIHLLTGKISIPGCGPFSLTGQPSACGTAREVGSFPHRLPADLVVTNPKHRETAERIWKLPKGTVSEKVGLHTIAQDRAMNDGEMNVLWQMCNNNMQAGPNINQERLPGWRKEGNFVIVSDPYPTVSALSADLILPTAMWVEKEGAYGNAERRTQFWRQQVKAPGEAKSDLWQLMEFAKYFTTDEMWTEDLLTQMPEYRGKTLYEVLFKNGQVDKFPLSELAEGQLNDESEYFGYYVHKGLFEEYAEFGRGHGHDLAPFDMYHKAHGLRWPVVEGKETLWRYREGYDPYVKEGEGVAFYGYPDKKAIILAVPYEPPAESPDNEYDLWLSTGRVLEHWHTGTMTRRVPELHRAFPNNLVWMHPLDAQARGLRHGDKIKISSRRGEMISYLDTRGRNKPPRGLVFTTFFDAGQLANSLTLDATDPISKETDFKKCAVKVEKAA

SEQ ID NO: 30093 - protein, 830 aa, Mannheimia succiniciproducens MBEL55E
MELNRRDFMKANAAVAAAAAAGITIPVKNVHAADDDMGIRWDKAPCRYCGTGCSVLVGTKDGRVVATQGDPDAEVNRGLNCIKGYFLSKIMYGADRVQTPLLRMKDGKFHKEGDFTPVSWDQAFTVMADKIKAILKEKKDPNAIGMFSSGQTTIFEGYAKVKLWKAGLRSNTIDPNARHCMASAAVAFLRTFGMDEPMGCYNDIEKTDAFVLWGSNMAEMHPILWSRISDRRLSSDKVKVVVMSTFEHRSFELADTPIIFKPHSDLAILNYIANYIIQNDKVNWDFVNKHTKFKRGETDIGYGLRPEHPLEVAAKNRKTAGKMYDSDFEEFKKIVAPYTLEEAHRISGVPKDQLETLAKMYADPQQNLVSFWTMGFNQHTRGVWVNHMVYNVHLLTGKISKPGCGPFSLTGQPSACGTAREVGTFVHRLPADMVVTNPKHVEIAENIWKLPKGTISNKPGFPAVQQSRALKDGKLNFLWQLCTNNMQGGPNINEEIFPGWRNPDNLIVVSDPYPSASAVAADLILPTCMWVEKEGAYGNAERRTQFWRQQVKGPGQSRSDLWQIVEFSKYFKTEEVWSEELLAQMPEYRGKTLYEVLYLNGEVNKFQTPTNVPGYINDEAEDFGFYLQKGLFEEYASFGRGHGHDLADFDTYHQVRGLRWPVVDGKETLWRYREGYDPYVKAGEEVSFYGYPDKKAIILGVPYEAPAESPDEEYDLWLCTGRVLEHWHTGTMTRRVPELHKAFPNNLCWMHPTDAKKRGLRHGDKVKLITRRGEMISHLDTRGRNKCPEGLIYTTFFDAGQLANKLTLDATDPISGETDYKKCAVKVVKA

SEQ ID NO: 30094 - protein, 183 aa, Glycine max
  misc_feature (3)..(4): Xaa can be any naturally occurring amino acid
  misc_feature (6)..(7): Xaa can be any naturally occurring amino acid
  misc_feature (9)..(11): Xaa can be any naturally occurring amino acid
  misc_feature (16)..(19): Xaa can be any naturally occurring amino acid
  misc_feature (24)..(24): Xaa can be any naturally occurring amino acid
  misc_feature (38)..(38): Xaa can be any naturally occurring amino acid
  misc_feature (61)..(61): Xaa can be any naturally occurring amino acid
NVXXSXXMXXXLQCSXXXXYKGTXKKMKISRDVIDASXRPITVKEILTIEIKPGWKRGTKXTFPEKGNEQRGVTPSDLVFIIDEKPHGVFKRDGNDLVVTQKISLVEALTSYTGQLTTLDGRNLTVSTNSVISPIYEEVIKGEGMPIPKEPSKKGNLRIKFNIKFPFRLTSEQKTGIKRLLTS

SEQ ID NO: 30095 - protein, 222 aa, Francisella tularensis subsp. tularensis SCHU S4
MKHIQINPSILSADLARLGDDVKAVLAAGADNIHFDVMDNHYVPNLTFGPMVLKALRDYGITAGMDVHLMVKPVDALIESFAKAGATSIVFHPEASEHIDRSLQLIKSFGIQAGLALNPATGIDCLKYVESNIDRVLIMSVNPGFGGQKFIPAMLDKAKEISKWISSTDRDILLEIDGGVNPYNIAEIAVCGVNAFVAGSAIFNSDSYKQTIDKMRDELNKV

SEQ ID NO: 30096 - protein, 178 aa, Zea mays
MASSMISSPAVTTVNRAGAGMVAPFTGLKSMAGFPTRKTNNDITSIASNGGRVQCMQVWPPIGKKKFETLSYLPDLDDAQLAKEVEYLLRKGWIPCLEFELEHGFVYREHNRSPGYYDGRYWTMWKLPMFGCTDASQVLKELQEAKTAYPNGFIRIIGFDNVRQVQCISFIAYKPPGF

SEQ ID NO: 30097 - protein, 618 aa, Medicago truncatula
MGGGVSQKGSWILFFTRRKQVDSPRQNTKPLLAKELSVYHLIAIGVGSTIGAGVYVLVGTVAREHSGPALAISFLIAGLAAGLSAFCYAELACRCPSAGSAYHYSYICLGEGVAWLIGWALLLEYTIGSAAVARGITPNLAPLFGGLDNLPFFLSRQHIPGIDIVVDPCAAILVLLVTGLLCLGIKESTVVQGIVTSVNVCALLFVIVAGGYMGFKSGWVGYELPTGYFPFGVDGMLAGSATVFFAYVGFDAVASTAEEVKNPQRDLPLGIGASLFLCCGMYMLVSVVVVGLVPYYAIDPDTPISSAFSDHGMQWAAYIINAGACTALISALMGGILPQPRILMAMARDGLLPPFFCDINKHTLVPVKGTIITGLAAAVLAFSMEVSDLAGMVSVGTLLAFTMVAISVLILRYIPPNKVPVPPSLQDSIVEIKVEYEEENIGTSEVSKPLDVTRDFSIDYPLISKHRSKGNHLNRRRVVGWTIAIICLGAFVLTYAASCLTFLSSVRFALCGVGGTLLVSGFVFLTCMDQDDARHDFGHSGGFVCPFVPLLPVACILINSYLLINLGAETWLRVSVWLATGLLIYGFYGRTHSSLKDAIYVPASQVDERYQPPRSHAA

SEQ ID NO: 30098 - protein, 274 aa, Streptococcus ratti
GAILVVASTDGPMPQTREHILLSRQVGVKYLIVFMNKVDLVDDEELLELVEMEIRDLLSEYDFPGDDIPVIQGSALKALEGDTEQEDVIMELMKTVDEYIPDPERDTDKPLLLPVEDVFSITGRGTVASGRIDRGTVKVNDEVEIVGIRDDIQKAVVTGVEMFRKQLDEGLAGDNVGVLLRGIQRDEIERGQVLAKPGSIHPHTKFKGEVYILTKEEGGRHTPFFNNYRPQFYFRTTDVTGSIELPAGTEMVMPGDNVTIDVELIHPIAVEQGT

SEQ ID NO: 30099 - protein, 471 aa, Vibrio parahaemolyticus RIMD 2210633
MILVWFRRDLRTLDHTALKAALDTGQPVVACFIATPEQWQEHHMAPMQADLIARRLEHVHQELTELNIPLLYKEVPRFDDCTQVICDWADKLNATAAMVNINYEVNEVELDRKVSQALDNRGVEFHAFHDKCVHAPTTVLNKQGEYFKVFTPFKRAWLQKFSLPTVSKPQRQNELPSAQLAAVKQDGFDADFTFSYPRESSEAWCVSTNDILKQLRTFARERSDGYQMKRDFPAIDGTSQLSPYLAIGALSPRQCIARLYAENPQPDLSEGKATWLSEIIWREFYQHLLVFEPKLVKGRGFIDWEDKIQWSYDEQAFECWKTGTTGYPIVDAAMRQLNQTGWMHNRLRMIVASFLTKDLHIDWRWGEEYFMSKLVDGDFAANNGGWQWSASTGCDGQPYFRIFNPISQGEKFDSDGQFVRHWVPEIKSVPNKFVHKPWTWEGFSLLEYHKPMVDHKVEREITLRLFKSAKE

SEQ ID NO: 30100 - protein, 591 aa, Triticum aestivum
SPSSVPPPVPLFFPMAQSWASFLLLALFSSTLLVCGSNGERVFLYPQSQKVSSIVSQRYRTAYHFQPPKNWINDPNGPMYYNGIYHEFYQYNPNGSVWGNIVWGHSVSTDLINWIPLEAAIERDTPSDINGCWTGSATILPGNRLVIIYTGADPEKRQVQNIVVPKNLSDPYLREWTKAGNNPVIQPVGPGLNSGQFRDPTTGWIGPDGLWRIAVGAELNGDSAALLYKSKDFLNWTRVDHPLYSSNSSSMWECPDFFAVLPGNSGGLDLSAAIPNGAKHVLKMSLDSCDKYMIGVYDLKSDTFIPDTVLDDRRLWSRIDYGNFYASKSFFDSKKGRRIIWGWTNETDSSSDDVAKGWAGIHAIPRTIWLDSHGKQLLQWPVEEVESLRGNEINHQGLELKKGGLFEIKGADSFQADVEIDFELTSIDKADPFDPSWLLDVEKHCREAGASVNGGIGPFGLVVLASDNMEEHTAVHFRVYKSEQKYMILMCSDLRSSSLRPGLYTPAYGGFFEYDLEKEKKISLRTLIDRSAVESFGGGGRVCIMARVYPVAVVDGVAHMYAFNNGSTTVRVPQLRAWSMRRAQVNVKGME

SEQ ID NO: 30101 - protein, 509 aa, Yersinia pestis biovar Medievalis str. 91001
MSIEINVPDIGADEVEVTEIMVKVGDTVEAEQSLITVEGDKASMEVPSPQAGVVKEIKIAVGDKVATGSLIMVFDATGAAAAPVKAEEKPAAPAQVAAPAASAAKNVEVPDIGDDEVEVTEVMVKVGDKVDAEQSLITVEGDKASMEVPAPFAGIVKEIKISTGDKVKTGSLIMVFEVEGAAPAPAAAPAAKAESKGEFAENDAYVHATPVIRRLAREFGVNLAKVKGTGRKGRILREDIQAYVKDAVKRAEAAPAAAGGGLPGILPWPKVDFSKFGEIEEVELGRIQKISGANLSRNWVMIPHVTQFDEADITEVEAFRKQQNIEAEKKKQDLKITPLVFLMKAAAKALEEFPRFNSSISEDGQKLTLKKYINIGVAVDTPNGLVVPVFRDVNKKGIVELSRELSVISKKARDGKLTASDMQGGCFTISSLGGIGGTAFTPIVNAPEVAILGVSKSSMKPVWNGKEFAPRLMLPLSLSFDHRVIDGAAGARFAAYIATIMADIRRLVM

SEQ ID NO: 30102 - protein, 274 aa, Streptococcus salivarius
GAILVVASTDGPMPQTREHILLSRQVGVKHLIVFMNKVDLVDDEELLELVEMEIRDLLSEYDFPGDDIPVIQGSALKALEGDSKYEDIIMDLMNTVDEYIPEPERDTDKPLLLPVEDVFSITGRGTVASGRIDRGVVRVNDEVEIVGLKEDIQKAVVTGVEMFRKQLDEGIAGDNVGVLLRGIQRDEIERGQVLAAPGSINPHTKFKGEVYILSKEEGGRHTPFFNNYRPQFYFRTTDVTGSIELPAGTEMVMPGDNVTIDVELIHPIAVEQGT

SEQ ID NO: 30103 - protein, 338 aa, Acinetobacter radioresistens
MSNHNVALQFEDGVTRFISVAQGETLSDAAYRQKINIPLDCRDGACGTCRAFCESGSYDMPEENYIEDALTPEEAEEGYILACQCRPTSDAVFQIQASSDVCKTEIHKFQGTLSRVENLSDSTITFDIELDEGQPDIHFLAGQYVNVEIPGTTETRSYSFSSKPGNRLTGFVVRNVPNGKMSEFLSKTVKPGDKMSFTGPFGSFYLRHINRPVLMLAGGTGIAPFMSMLQVLQEKGCEQPVRLVFGVTNDFDLVALEKLDELQEKFPWFEYCTVVANPESLHERKGYVSNHIDHDWLNSGDVDIYLCGPVPMVEAVRGWLDAEGVKPANFLFEKFSAN

SEQ ID NO: 30104 - protein, 265 aa, Streptococcus sanguinis
VVASTDGPMPQTREHILLSRQVGVKHLIVFMNKVDLVDDEELLELVEMEIRDLLSEYDFPGDDLPVIQGSALKALEGDSKYEDIIMELMDTVDEYIPEPERDTDKPLLLPVEDVFSITGRGTVASGRIDRGIVKVNDEIEIVGIKEEIQKAVVTGVEMFRKQLDEGLAGDNVGVLLRGIQRDEIERGQVIAKPGSINPHTKFKGEVYILTKEEGGRHTPFFNNYRPQFYFRTTDVTGSIELPAGTEMVMPGDNVTIDVELIHPIA

SEQ ID NO: 30105 - protein, 107 aa, Prochlorococcus marinus subsp. pastoris str. CCMP1986
MSSAPAVTDSSFDKEVLQSNLPVLVDFWAPWCGPCRMVAPVVEEISKDFEGKIKVFKLNTDENPNVASQYGIRSIPTLMIFKGGQKVDTVVGAVPKATLSSTLSKHL

SEQ ID NO: 30106 - protein, 237 aa, Oenococcus oeni PSU-1
MAKLVFIRHGQSEWNALNLFNGWVDTKLSEEGIRQAKEAGELLAEKGIQFDQAYTSVLTRAIQTLHIALEEIDQLWIPEEKSWRLNERHYGALQGLNKKASAEKWGDEQVHIWRRSYDTLPPLQDEIQKSITVNGKTYPALDRRYAELDPKTLPLGENLKVTLERVMPFWEDKIAPDLRAGKNVIIAAHGNSLRALSKYIENISDADIMGLEIANGQPIIYDFDENLKFTNKELLSK

SEQ ID NO: 30107 - protein, 265 aa, Streptococcus sobrinus
VVASTDGPMPQTREHILLSRQVGVKNLIVFMNKVDLVDDEELLELVEMEIRDLLSEYDFPGDDIPVVQGSALKALEGDTAAEDKIMELMDIVDDYIPEPKRDTDKPLLLPVEDVFSITGRGTVASGRIDRGTVKVNDEVEIVGIRDDIQKAVVTGVEMFRKQLDEGLAGDNVGVLLRGIQRDEIERGQVLAAPGSIHPHTKFKGEVYILSKDEGGRHTPFFNNYRPQFYFRTTDVTGSIELPAGTEMVMPGDNVTIDVELIHPIA

SEQ ID NO: 30108 - protein, 199 aa, Triticum aestivum
  misc_feature (113)..(113): Xaa can be any naturally occurring amino acid
MSSSSSFLGSRFPFAAVGAGAGASGGSGAGGSGSSVRPWGSSGGTSVSSSGKRIQKELLDLNASDCSAGPKGDNLYHWLSTIIGPQGSPYDGGIFFLDIVFPLDYPFKPPMIXNCWNPVTFKTRIYHCNVDSTGAVSLEILKDGWSPALTISKVLLAIKAIITNPDPYNPLVESIARLYLTDRAKHDEIAAEWTLRFAR

SEQ ID NO: 30109 - protein, 263 aa, Streptococcus uberis
VVASTDGPMPQTREHILLSRQVGVKHLIVFMNKIDLVDDEELLELVEMEIRDLLSEYDFPGDDLPVIQGSALKALEGDSKYEDIIMELMKTVDEYIPEPERDTDKPLLLPVEDVFSITGRGTVASGRIDRGTVRVNDEIEIVGIKEETKKAVVTGVEMFRKQLDEGLAGDNVGILLRGVQRDEIERGQVIAKPGSINPHTKFKGEVYILSKDEGGRHTPFFNNYRPQFYFRTTDVTGSIELPAGTEMVMPGDNVTISVELIHP

SEQ ID NO: 30110 - protein, 301 aa, Mycobacterium smegmatis
EEIAMRDDDPEDTLGDVFLSAMFGDHPVGRPVIGSIESISEMTRAQLHSFHVRRYTPDRMVLAVAGNVDHDEVVALAREHFGRRLVQGRDAVPPRKGSGRVPGRPSLRVVERDGEQTHVSLGVRTPGRHWEHRWALSVLNTALGGGLSSRLFQEIRETRGLAYSVYSTVDTFSDSGALSIYAGCLPERFEEVVRVTTDVLETVARDGISENECRIAKGSLRGGLVLGLEDSASRMHRIGRAELNYGEHRSIEQTLAQIDAVTLDEVNAVARQLLTRDYGAAVLGPDTAKVALPQRLQDIAS

SEQ ID NO: 30111 - protein, 483 aa, Rickettsia rickettsii
MAEFTPITIAYGDGIGPEIMEAVLYILRKAEARIRLETIEVGEKLYKKHYTSGISEESWESIQRTGIILKAPITTPQGGGYKSLNVTIRKTLQLFANIRPAVSFHPFTRTLHPNLNLTIIRENEEDLYAGIEYRQTHNMYESMKLISHTGCEKIIRYAFEYAVKNNRKKVMCLSKDNIMKFSDGVLHKVFNEIAKEYPQINNAHYIIDIGTARLATKPEIFDVIVTSNLYGDIISDVAAEISGSVGLAGSANIGQHYAMFEAVHGSAPDIAGKDIANPSGLLNAAIMMLVHIGQGDIATLIENAWKKTIEDGVHTADIYNEQSSSKKVGTKEFAEEVTKRLGQLPTKLPKADYPLIAEKQESNIDYKIDTKEVKKLVGTDIFVNMNVSSAHDIADKINKLDLGNFELKTISSKGLKLWPRDTRFETVSDHWCCRFMNKDGTEIKHLDITRLLEALSTANIDFIKVENLFEFDGVAGYSLAQGE

SEQ ID NO: 30112 - protein, 548 aa, Xanthomonas oryzae pv. oryzae KACC10331
MRSDATPRPPLSHSQESSMLDANLKTQLTAYLERVTRPIQINASIDESPGSREMLDLLEELVLLSDKISLDIHRDDDQRKPSFALTTPGQDIALRFAGLPMGHEFTSLVLALLQVGGHPSKAAAELIEQVQHLDGDYRFETYFSLSCQNCPDVVQALNLAAVLNPRIKHVAIDGAWFQDEVETRQIMSVPTVYLNGELFDQGRMTLEQIVAKLDTNASKRDAAKIAAKGAFDVLVVGGGPAGAAAAVYAARKGIRTGVAAERFGGQVLDTMSIENFISVPETEGPKMAAALEQHVRQYEVDIMNLQRAEQLIPAGADGLIEIKLANGASLKSKTVILSTGARWRQMNVPGEDQYKNKGVAYCPHCDGPLFKGKRVAVIGGGNSGVEAAIDLAGIVAHVTLVEFDDKLRADDVLQRKLRSLHNVRIITSAQTTEVLGDGQKVTGLVYKDRTGGAIQHFDLEGVFVQIGLLPNTEFLRGTVALSPRGEIIVDDRGQTDVPGVFAAGDATTVPYKQIVIAMGEGSKAALSAFDHLIRSSAPATADNVAQAA

SEQ ID NO: 30113 - protein, 164 aa, Silene viscosa
AQQIEKVMRALGDYLGVKVHACVGGTSVREDQRILQSGVHVVVGTPGRVFDMLKRQSLRADSIRMFVLDEADQMLSRGFKDQIYDIFQLLPPKIQVGVFSATMPPEALEITRKFMNKPVRILVKRDELTLEGIKQFYVNVDKEEWKLETLCDLYETLAITQSVI

SEQ ID NO: 30114 - protein, 300 aa, Rhodobacter capsulatus
MADRRDHRIIDGKAVQQRLLAGIRAELEAAAETHPVGRLVSISIGPSPEIEVYVRNQARAAATAGLPFEQVVWEASATQEACKRKIAALNDDPSVLGIILQRPVPAHIHVRSLQSAIHPLKDVEGMNPASIGNIVYNDIALAPCTAAAAVEMVRATGLPLPGLEVVMIGHSEIVGKPVAFLLMAEGATVTVCHHMTRSVAMHSRRADVVIVAVGKAHLIGPEMIKPGAAVIDIGINQVTDAAGKVRILGDVDTEAVREVAGWITPVPGGVGPVTVAMLMRNALTAHRRQVAAGWLEAAKA

SEQ ID NO: 30115 - protein, 546 aa, Prochlorococcus marinus subsp. pastoris str. CCMP1986
MSKDPGRILIFDTTLRDGEQSPGASLNLEEKLAIAHQLARLGVDVIEAGFPFASPGDFKAVNKIAEVVGGENGPIICGLARASTNDIKACYEAISPAPKKRIHTFIATSDIHLKHKLRKTRSDVLCIVPEMVSYAKSLVDDIEFSCEDASRSDPEFLYEVIQLAITSGATTINIPDTVGFTTPSEFGKLIFDINKNVPNIDEAIISVHGHNDLGLAVANFLEAAKNGARQLECTINGIGERAGNASLEELVMALHVRKSFFNSFFGRSSDSPTPLTAIRTEEITKTSRLVSNLTGMNVQPNKAIVGANAFAHESGIHQDGVLKNRLTYEIIDAKTVGLNDNKISLGKLSGRSAVRARLEEMGYDLSREDLNDAFARFKELADRKREITDRDLEAIVSEQVQLPESKFQLSHVQVSCGSTSKPTATVTLINTEDHTEDTAVAIGTGPVDAVCEALNALTKVPNELIEFSVKSVTEGIDALGEVTIRIRNKNKIYSGHSADTDVVVAAANAFVNALNRLVFSEKKNSIHPQFDDLENPKNKVLSNPKK

SEQ ID NO: 30116 - protein, 151 aa, Silene latifolia
  misc_feature (150)..(150): Xaa can be any naturally occurring amino acid
AVIGADGANSRVAKNIGAGDYEYAIAFQERIKIPDSKMTYYEDLAEMYVGDDVSPDFYGWVFPKCDHVAVGTGTVTHKSDIKKFQLATRTRAMDKIEGGKIIRVEAHPIPEHPRPRRVLDRVALVGDAAGYVTKCSGEGIYFAAKSGRMXA

SEQ ID NO: 30117 - protein, 151 aa, Silene viscosa
  misc_feature (134)..(134): Xaa can be any naturally occurring amino acid
AVIGADGANSRVAKNIGAGDYEYAIAFQERIKIPDSKMTYYEDLAEMYVGDDVSPDFYGWVFPKCDHVAVGTGTVTHKSDIKKFQLATRTRAMDKIEGGKIIRVEAHPIPEHPRPRRVLDRVALVGDAAGYVTXCSGEGIYSAAKSGRMCA

SEQ ID NO: 30118 - protein, 242 aa, Oryza sativa
MRKAYKDSLKVLEADIQHANTLASEFPREYDGACLQMRLSYSPAAHIFLFLVQWTDCSLAGALGLLRILVYKVYVDGTTTMSTHERKASIKEFYAVIFPSLLQLQRGITDTEDKKQKAVCMERYRRRDEDERNILSEIDAEREEECGICMEMNSKVVLPNCTHNMCLRCYQDWNSRSQSCPFCRDNLKKTDPGDLWIYVEDQDVVDLETVSRENLRRLFMYINKLPLIVPDVIFSIYDSHIK

SEQ ID NO: 30119 - protein, 396 aa, Desulfotalea psychrophila LSv54
MSKEKFERTKPHVNVGTIGHIDHGKTTLTAAITRVLSTKGQASFTDFSDIDKAPEEKERGITIATAHVEYETVNRHYAHVDCPGHADYIKNMITGAAQMDGAILVVAATDGAMPQTREHILLARQVGVPAMVVFLNKCDMVDDDELIELVEMELRELLDDYEFPGDDVPFIHGSALLALENPEDEDKAACIWALMEAIDSYIPEPERDVDQPFLMPVEDVFSISGRGTVATGRVERGIIKVGEEVAIVGVKDTVKTTCTGVEMFRKLLDEGRAGDNIGALLRGVKREDIERGQVLAKPGTITPHTKFKAECYILGKDEGGRHTPFFNGYRPQFYFRTTDVTGVVSLPEGIEMVMPGDNVSVDATLITPIAMDAGLRFAIREGGRTVGAGVISEIIE

SEQ ID NO: 30120 - protein, 402 aa, Robiginitalea biformata HTCC2501
MMVCTALVFFMHTGFAFLEIGLTRQKNTINILFKNIFIITVGLLMYYIGGFNLMYPGEFNGFLGFAGFGLETDAAGLTPEYADGGYTYWTDFLFQGMFAATAATIVSGAVAERIKIGPFMVFTIIYVGLVYPIVGSWQWGGGFLSTLGGDDAGFYDFAGSTLVHSVGGWGALIAIWLLGSRIGKFDEDGKPKAIPGHNNPLATAGVLVLWLGWFGFNGGSVLSGDPALTSLVLTTTSLAAAAGGVSAFLVSTLAYKNYDLTMFLNGILGGLVGITAGADLMSPNEAVVIGLIAGAIIVGGVALIDRIRLDDPVGAVTVHLICGIWGTLAVGIFGDKAGMDQFLYQLTGVGAAGVFCIVTAAIIILALKKTVGIRVSREEELEGLDIHEHGMDAYSDFRLNQH

SEQ ID NO: 30121 - protein, 401 aa, Nicotiana tabacum
MESRVLTGATAIRGLPLLRKPVVKLTAASFPTVAKPIGAVSGGANLIWGRQLRPDILLEASPKRESMKPCFTAASSPAEGSDSAGDAKVGFFNKATLITGFFFFMWYFLNVIFNILNKKIYNYFPYPYFVSVIHLAVGVVYCLISWTVGLPKRAPIDSTQLKLLTPVAFCHALGHVTSNVSFAAVAVSFTHTIKALEPFFNASASQFILGQQIPLALWLSLAPVVLGVSMASLTELSFNWLGFISAMISNISFTYRSIYSKKAMTDMDSTNVYAYISIIALIVCIPPAIIIEGPQLLQHGFADAIAKVGLTKFVTDLFWVGMFYHLYNQVATNTLERVAPLTHAVGNVLKRVFVIGFSIIVFGNKISTQTGIGTCIAIAGVALYSFIKAKMEEEKRQKKAA

SEQ ID NO: 30122 - protein, 712 aa, Arabidopsis thaliana
MVVATTIALYASPASTVCSTAHQINAHISCDLDLNSRSSSASSSTSSPTIGGLSLLFSGASVKSSSSSSSSHPSVGEELASIRHDRSEDRTLSGSFCYSPSKFIGSSYLKRDHQSPVSVLHGPISSGNSPPMRISRDRNLDGGSALRVGSSRLFNGFVRKAIGSCVDYDTDSVLVDEQLPFTMDDGFEGERRQPYARDLLRRAQLKHKIFEDESVIKAFYEAEKAHRGQMRATGDPYLQHCVETAMLLADIGANSTVVVAGILHDTLDDSFMSYDYILRTFGSGVADLVEGLSQLSKLARENNTACKTVEADRLHTMFLAMADARAVLIKLADRLHNMMTLYALPPVKRQRFAKETLEIFAPLANRLGISSWKVKLENLCFKHLHPDQHHEMSDMLEDSFDEAMITSAIEKLEQALKKEGISYHVVSGRHKSLYSIYCKMLKKKLTMDEIHDIHGLRLIVDNEKDCYKALGVVHKLWSEVPGKLKDYISHPKFNGYQSLHTVVMGDGTIPLEVQIRTKEMHLQAEFGFAAHWRYKEGDCKHSSFVLQMVEWARWVVTWHFETMSKDGSSICSSEPLCSFPSHAEDCPFSYKPSGNQEGPVYVIVIENEKMTVQEFPENSTVSDLLRRAGPGSSRWSMYSIPAKEELRPRLNQTPVSDLKCKLKMGDVVELTPAIPDKSLTEYREEIQRMYDRGLAFSRPHRAATGTMVGWGS

SEQ ID NO: 30123 - protein, 436 aa, Triticum aestivum
MMQPPPPSQPQPGMGAPMPPQGAGGQPPHWGAIPPPMPHYAQPPPQQQPPPQAMWGQPPPQAAPYGQVPAPQQYYAAPQAPAAPAASDEVRTLWIGDLQYWMDENYIYSCFANTGEFQSVKLIRDKQTGQLQGYGFVEFASHAAAERVLQTFNGQMMPNVELAYRLNWASAGEKRDDTPDYTIFVGDLAADVTDYMLQETFRVHYPSVKGAKVVTDKMTMRSKGYGFVKFGDPTEQARAMTEMNGMPCSSRPMRIGPAANRKTTGVQERVPIPNTNTQGAQSDNDPNNTTIFVGGLDPNVTEDALKQVFAPYGEVVHVKIPVGKRCGFVQYANRPSAEQALQLLQGTLVGGQNVRLSWGRSPSNKQTQPQEASQWGAGAAAGAAGGYYAGYGQGYEAYGQGYAQPQDPNMYGYGAYAGYPNYQQPAAAPQPPPPQQ

SEQ ID NO: 30124 - protein, 440 aa, Novosphingobium aromaticivorans DSM 12444
MRPLYHYAPAANWLSDPNGLVWQDGEWHLFYQYNPFGEDWGHMSWGHAVSRDLVTWQELPVALAEEDGTMIFSGSAVIDHQGSAGFGKGAMVAVYTGARTDRAHQFQSIAASTDRGRTFTKFTGNPVLDLQMADFRDPNVFWHGPSGRWIMSVVLSEENRAQLYASVDLRHWDLLSDIGRDGAPGHLWECPWMVELPVEGTDETRWLFKVDVLSGAAGQASPWRVGHFDGRRFVPETGWAVGDHGPDFYAAIGWNAAPDAEGRPVWIGWAGNHAYQKYLEPQGWRGAMTLPRRVSLRRDESGYALVQEVEPACRALFGKAEATSLCDGCIPLPSAALLSFPAGKDWSFRIEDDHGRSIECALSGGRLTVRRHDPVTPQLEHRAAMEAGKGPVELWLDAGSLEVFANRGGAVLTLQHRLAGEAWALRGEGACSVAYPAAMA

SEQ ID NO: 30125 - protein, 265 aa, Streptococcus vestibularis
VVASTDGPMPQTREHILLSRQVGVKHLIVFMNKVDLVDDEELLELVEMEIRDLLSEYDFPGDDIPVIQGSALKALEGDSKYEDIIMDLMNTVDEYIPEPERDTDKPLLLPVEDVFSITGRGTVASGRIDRGVVRVNDEVEIVGLKEEIQKAVVTGVEMFRKQLDEGIAGDNVGVLLRGIQRDEIERGQVLAAPGSINPHTKFKGEVYILSKEEGGRHTPFFNNYRPQFYFRTTDVTGSIELPAGTEMVMPGDNVTIDVELIHPIA

SEQ ID NO: 30126 - protein, 489 aa, Francisella tularensis subsp. tularensis SCHU S4
MVELKVPMFPESVADGTLAQWNKNEGDFVNEGDILAEIETDKVVLEVPATSSGVLKGIKKHAGDTVLSEESLAIIDTAVSTSEPNQQTTNQGNASEATATGQEIDIKAPVFPESVADGTISEWHKKEGEAVSEGDILAEIETDKVVLEVPATSNGVLTKILKTAGETVLSAELIAKITAGGATATTKSEASVGVSQANNDPHLVPSARKAFNASGLDTAANIEGTGKKGRITSEDVKKAVASVNKPQQQTVVINQGARYEKRVKMTRLRQTIANRLVEVQHTNAILTTFNEVDMSAVMELRNKYKDMFVKEHDTKLGFMSFFIKAATEALKKFPDVNASIDGDEIVYHNYFDIGIAVGTDRGLVVPVLRDTDTKSLAELEADVLDKAIKGRDGKLSLEDMQGGTFTITNGGTYGSMLSTPIINSPQSAILGMHNIVERPVVVKGEIKIRPIMYLALSYDHRIIDGGTSVRFLKMIKELIEDPNRILLQV

SEQ ID NO: 30127 - protein, 270 aa, Diospyros kaki
NWGLFELVNHGIPPELMDTVERLTKEHYKKCMEQRFKELVASKALEGVQAEVTDMDWESTYFLRHLPQSNISELPDLDEEYRRVMKDFAERLEKLAEYLLDLLCENLGLEKGYLKKAFYGTKGPNFGTKVANYPPCPKADLIKGLRAHTDAGGIILLFQDDKVSGLQLLKDDQWIDVPPMKHSIVINLGDQLEVITNGKYKSVLHRVVAQTDGTRMSIASFYNPGNDAVIYPAPALVEKEIQEKEIYPKFVFDDYMKLYAALKFQAKEPR

SEQ ID NO: 30128 - protein, 565 aa, Treponema denticola ATCC 35405
MAKKVVIVGGVAGGASVAARVRRLDENAEVIMFEKGPNVSFSNCALPFFLSRIVPESENLVLMTPEKFKKQYNIIAKTSHEVLAVDSSKKIVKVKDLNTGTEFEESYDVLVLSPGAAPVVPRSIAGYDKPHVFTVRNVADIKKLDDYVKAQNVKDIAVIGAGFIGIEVAENFKLAGKNVSLVEKLPQVMAPFDYDMVQILHKELHDKGVNLVLGDGIKEIGDGFIILESGKKLDAGAVVLSLGVRPEVALAQSAGVKLGDTGAILVDHNYRTNVEDIYAVGDAIEVSHFITGKKTRLTLAGPAQRQARAAADDMYGIPHRNKGVIGSSVIQCFDYNAACTGLNERECQAQGINYDFVYVIPGDKVGLMPDAHPLFFKLIFANPSGKILGAQAIGKGNVDKRIDVIASFIMLGGTLEDLKELELCYSPMFGTAKDIVNHAALVGLNILNGVYKQVPVTMVRELVESNAFIVDVREPKEFEAGHLLNAVNIPLSQLRERMNEIPKDKPVYVHCRSSQRSYNALCALKGKGYKNIVNIMGSFLGISVYEYFNDITQNRKPIVTKYNFR

SEQ ID NO: 30129 - protein, 160 aa, Bacillus cereus E33L
MTVYDFSAKTITGEEKSLKDYEGKVLLIVNVASKCGFTPQYKGLQEVYDKYKGQGLEILGFPCNQFGGQEPGTEADITSFCELNYGVNFPMFAKIDVKGDKAHPLYTYMTEQAPGLLGMKAVKWNFTKFLIGKDGKVVGRFAPQTKPVDLEVEIEKVLGE

SEQ ID NO: 30130 - protein, 520 aa, Aquifex aeolicus
MGEKVYIFDTTLRDGEQAPGFSMTTEEKLQMAHQLAKLNVDIIEAGFAAASKGDFEAVNRIAKEVKGPVICSLARALESDIEIAAKALEPAERKRIHTFIATSPIHMEYKLRMTPDQVLERIKKAVSFARNFTDDVEFSCEDATRSEREFLYRAIETAIKHGATVINIPDTVGYAIPEEFGQLIEDIMNNVPNIDKVILSVHCHDDLGLATANSLTAVKHGARQVECTINGIGERAGNAALEEVVMALKVRKDFFGDLYTDVNTKEIYKTSRLLCRITGNFVQPNKAIVGDNAFAHESGIHQHGVLSHRMTYEIMNPEDVGFPMSRIVLGKHSGRHALKRRLEELGFKFTKEELDRIFEKFKELADRKKEVYDEDLEALIYQEFMKIEDHEPVKVLHFQVQSGDNMIPTATVKLEFKGEEREASSTGNGPVDATIKAIQKALGIEPKLLDYSIKALTPNTDAQAEARVVLELDGVKASGRGVDTDIIKASVKAFTDALNRAIVRKEYIIQRQEIREEGTV

SEQ ID NO: 30131 - protein, 987 aa, Glycine max
MERARRLANRAILRRLVSEAKQHQKNESVLHSSTTPMLLYSSSRCMSSVLRSRGSKTETLLGRNINMSRGVVVAAAGGFLGVGSARSISVEALRPSDTFPRRHNSATPEEQSKMAESCGFGSLDSLVDATVPKSIRLKDMKFGKFDAGLTENQMIEHMKDLASKNKVFKSYIGMGYYNTHVPPVILRNIMENPAWYTQYTPYQAEISQGRLESLLNYQTMITDLTGLPMSNASLLDEGTAAAEAMSMCNNIQKGKKKTFIIASNCHPQTIDICKTRADGFDLKVVTADLKDIDYKSGDVCGVLVQYPGTEGEVLDYGEFVKKAHAHEVKVVMASDLLALTVLKPPGEFGADIVVGSAQRFGVPMGYGGPHAAFLATSQEYKRMMPGRIIGVSVDSSGKTALRMAMQTREQHIRRDKATSNICTAQALLANMAAMYAVYHGPEGLKNIAHRVHGLAGAFALGIKKLGTVEIQDLPFFDTVKVKTSNAHAIADAALKSGINLRVVDGNTITVAFDETTTLEDVDNLFKVFAGGKPVSFTAASLAPEVQSAIPSGLVRKSPYLTHPIFNTYQTEHELLRYLYRLQSKDLSLCHSMIPLGSCTMKLNATTEMMPVTWPSFSDIHPFAPVDQAQGYQEMFNNLGELLCTITGFDSFSLQPNAGAAGEYAGLMVIRAYHLARGDHHRNVCIIPVSAHGTNPASAAMCGMKIVSVGTDAKGNINIEELRKAAETHKDNLSALMVTYPSTHGVYEEGIDEICNIIHDNGGQVYMDGANMNAQVGLTSPGWIGADVCHLNLHKTFCIPHGGGGPGMGPIGVKKHLAPFLPSHPVIETGGIPAPDKPQPLGTIAAAPWGSALILPISYTYIAMMGSKGLTDASKIAILNANYMAKRLENYYPVLFRGVNGTVAHEFIIDLRGFKNTAGIEPEDVAKRLMDYGFHAPTMSWPVPGTLMIEPTESESKAELDRFCDALISIRQEIAEIEKGNKSITEPV

SEQ ID NO: 30132 - protein, 585 aa, Arabidopsis thaliana
MVLPELLVILAEWVLYRLLANSCYRAARKLRGYGFQLKNLLSLSKTQSLHNNSQHHLHNHHQQNHPNQTLQDSLDPLFPSLTKYQELLLDKNRACSVSSDHYRDTFFCDIDGVLLRQHSSKHFHTFFPYFMLVAFEGGSIIRAILLLLSCSFLWTLQQETKLRVLSFITFSGLRVKDMDNVSRSVLPKFFLENLNIQVYDIWARTEYSKVVFTSLPQVLVERFLREHLNADDVIGTKLQEIKVMGRKFYTGLASGSGFVLKHKSAEDYFLDSKKKPALGIGSSSSPQDHIFISICKEAYFWNEEESMSKNNALPRERYPKPLIFHDGRLAFLPTPLATLAMFIWLPIGFLLAVFRISVGVFLPYHVANFLASMSGVRITFKTHNLNNGRPEKGNSGVLYVCNHRTLLDPVFLTTSLGKPLTAVTYSLSKFSEFIAPLKTVSLKRDRKKDGEAMQRLLSKGDLVVCPEGTTCREPYLLRFSPLFAELTEDIVPVAVDARVSMFYGTTASGLKCLDPIFFLMNPRPVYCLEILKKLPKEMTCAGGKSSFEVANFIQGELARVLGFECTNLTRRDKYLVLAGNEGIVR

SEQ ID NO: 30133 - protein, 541 aa, Oryza sativa
MSAAHLLRHSRKLRSLHNALDCERSGLVRYFSTASGSFPTKGNGAEKRIGGARFPQRKQPGKELETSKLSLGLNGSYTCRRSPNNFIPNTITGLNGSLSCGQIASARSFSSSADLPPHQEIGMPSLSPTMTEGNIARWLKKEGDKVSPGEVLCEVETDKATVEMECMEEGYLAKIIHGDGSKEIKVGEIIAVTVEEEGDIKKFKDYKPSTLAAPVAPSELKAQSEPTEPKVEEREPSKASELKAPRTEEPSRSGDRIFSSPLARKLAEDNNVPLSSVKGTGPDGRILKADIEDYLAKGCRKEALAAPGLSYTDVPNAQIRKVTANRLLSSKQTIPHYYLTVDTRVDNLIKLRGELNPLQESSGGKKISINDLVIKAAALALRKVPQCNSSWMNDFIRQYHNVNINVAVQTEHGLFVPVIRDADKKGLGMIAEEVKQLAQRARDNSLKPDDYEGGTFTISNLGGPFGIKQFCAIINPPQSAILAIGSAERRVIPGSANGQYEFGSFMSATMSCDHRVIDGAIGAEFLKAFKGYIENPTSMLL

SEQ ID NO: 30134 - protein, 75 aa, Arabidopsis thaliana
  misc_feature (51)..(51): Xaa can be any naturally occurring amino acid
  misc_feature (53)..(53): Xaa can be any naturally occurring amino acid
  misc_feature (60)..(61): Xaa can be any naturally occurring amino acid
  misc_feature (64)..(64): Xaa can be any naturally occurring amino acid
  misc_feature (69)..(69): Xaa can be any naturally occurring amino acid
MASSMLSSTAVVTSPAQATMVAPFTGLKSSASFPVTRKANNDITSITSNGXKXVAAMKVXXPNXKEEVXTLSYLP

SEQ ID NO: 30135 - protein, 404 aa, Bradyrhizobium japonicum
MSVEISKLASGLTVVTDKMPHLETAALGVWAGVGGPHEGKPNEHGISHLLEHMAFKGTTKRSSRRRIVEEIEAVGGDLNAGTSTETTSYYARVLKADVPLALDVLADILANPAFEPDELEREKNVIVQEIRAAQDTPDDVVFEHLNELCYPDQPMGRSLLGTAKSLRAFNRDMLRGYLSTHYRGPDMVVAAAGAVDHSQVVAEAEKRFASFEGTPGPKPQAAQFGKGGAKVVHRELEQAHLALALEGVPQNDLSLFSLQVFTNILGGGMSYQLFQEVREKRGLCYSIYSFHAPYTDTGFFGLYTGTDPADAPEMMEVVVDVMNDSVETLTEAEIARAKAQMKAGLLMALESCSSRAEQLARHVLAYGRPQTVQELVARIDAVSVESTRDAARALLSRTALRLSH

SEQ ID NO: 30136 - protein, 447 aa, Salmonella enterica subsp. enterica serovar Typhi str. CT18
MKKVKKLSLTDLVLYGLVFMVPIAPVSLYGVVYNLSHGMVALVYIIGAIAMFFTAYSYSTLSQHISSSGSAYAYAGVCINPAVGFLTGWILLLDYLLFPTLVAVLGGVAVHAILPQIPVWVWPLIYVAIGTGVNYLGIQQTAKFDKLLVFIQLGILAIFVLLIIRLMMQDSSQITLSFRPFFDSQWFTPGLIATAISVAALNFLGFDAISTLSEESEGGGRAVSKATLLALVLATVLFIIVVAFAAFATGNVDRFAEGNATNEAFFTIAGNVGGIWLKVAFSIIVAFVCAVGNIITAQTAVSRVLFSMGRDRMLPAFLAHVHTTRKTPDYAILFTGGVTLLLSYLFSGKIESISTLVNFGALFAFFVVNLCVFILFNFRMKAQRRIFAHVISPIMGMIVIGYVCLNMNIHALILGISWAAIGIAILCYRKAYNQNIAIDLEGKKLLD

SEQ ID NO: 30137 - protein, 398 aa, Methanocaldococcus jannaschii
MDFLFENSWKAVCPYNPKLDLKDIYIYDTTLRDGEQTPGVCFTKEQKLEIARKLDELGLKQIEAGFPIVSEREADIVKTIANEGLNADILALCRALKKDIDKAIECDVDGIITFIATSPLHLKYKFNNKSLDEILEMGVEAVEYAKEHGLFVAFSAEDATRTPIEDLIKVHKAAEEAGADRVHIADTTGCATPQSMEFICKTLKENLKKAHIGVHCHNDFGFAVINSIYGLIGGAKAVSTTVNGIGERAGNAALEELIMALTVLYDVDLGLNLEVLPELCRMVEEYSGIKMPKNKPIVGELVFAHESGIHVDAVIENPLTYEPFLPEKIGLKRNILLGKHSGCRAVAYKLKLMGIDYDREMLCEIVKKVKEIREEGKFITDEVFKEIVEEVLRKRNKN

SEQ ID NO: 30138 - protein, 828 aa, Salmonella enterica subsp. enterica serovar Typhi str. CT18
MKLSRRSFMKANAVAAAAAAAGLSVPGVARAVVGQQEAIKWDKAPCRFCGTGCGVLVGTQQGRVVACQGDPDAPVNRGLNCIKGYFLPKIMYGKDRLTQPMLRMKDGSYHKDGEFTPVSWEQAFDVMEEKFKTALKEKGPEAIGMFGSGQWTIWEGYAAAKLFKAGFRSNNIDPNARHCMASAVVGFMRTFGMDEPMGCYDDIEQADAFVLWGSNMAEMHPILWSRITNRRLSDPNVKVAVLSTFQHRSFELADNGIVFTPQSDLVILNYIANYIIQNNAVNQDFFTKHVNLRKGATDIGYGLRPTHPLEKAAKNPGSDASEPMSFDEYKAFVAEYTLDKTAEMTGVPKDQLEQLAQLYADPNKRVISYWTMGFNQHTRGVWANNLVYNLHLLTGKISQPGCGPFSLTGQPSACGTAREVGTFSHRLPADMVVTNEKHRDICEKHWQIPAGTIPAKVGLHAVAQDRALKDGKLNVYWVMCNNNMQAGPNINEDRMPGWRDPRNFIIVSDPYPTVSALSADLILPTAMWVEKEGAYGNAERRTQFWRQQIKAPGEAKSDLWQLVQFSRRFKTEEVWPEALLAQKPELRGKTLYDVLFATPAVSKFPLSELKEDQLNDESRELGFYLQKGLFEEYAWFGRGHGHDLAPFDDYHNARGLRWPVVEGKETQWRYSEGNDPYVKAGEGYKFYGKPDGKAVIFALPFEPAAESPDNEYDLWLSTGRVLEHWHTGSMTRRVPELHRAFPEAVVFIHPLDAKARDLRRGDKVKVSSRRGEVISIVETRGRNRPPQGLVYMPFFDAAQLVNNLTLDATDPLSKETDFKKCAVKLAKV

SEQ ID NO: 30139 - protein, 149 aa, Prochlorococcus marinus str. NATL2A
MEVRFREVDPFNCWIWIRYSGVPSKGEKDYIDGIFDSWYVLGRLGGFNSENLQTHEMGADVSWMSYENDDTSYSLPSLMHNLGEFEFNECWARCWVDLGTSDLIAIDILINVLKQMDVDVLKIEELIIGGVNEDWPVEEHPDAIFSSTD

SEQ ID NO: 30140 - protein, 147 aa, Xanthomonas campestris pv. holcicola
MSQQVIIFDTTLRDGEQALQASLSVKEKLQIALALERMGVGVMEVGFPVSSPGDFESVQTIARQVKNSRVRALARCVEKDIDVAAESLKVAEAFRIHTFIATSPMHIATKLRSTLDEVIERAIYMVKRARNYTDDVEFSCEDAVTSS

SEQ ID NO: 30141 - protein, 576 aa, Photobacterium sp. SKA34
MIDPEKHIALLKLKLNREHASRLAAEKLLEAKSHELYNANQLLNDSYEKLQMQAKFDSELLTYQNKMENLLLRYARLFLKHSATRESIQQLLDSLVDGIYISGCHISIYPADNINISGSYSSGRLQQWIPPADLDSTNSLWDIGEHTLWINIINNRGKIGVLAVRIACKDDRLPAIQKHMALFCELFRSAIGRQITFNQAIDAKKRAEDSEQSTRDFLAMINHELRTPLNGLLGSAELLQDTPLDNDQQKLLTTLNHSGELLRAIINDLLDYSKINAGMLELIEKPFDCHLLAVKLEDIFTHRSHEKRLDFNIYYSHDLPKVFIGDEDRIKQIFVNLISNAIKFTPAGFVHAKLWWHNKQLQFTVKDSGCGIDHSDQHKLFKPFSQVDITSKRSHEGTGLGLVICKQLCEQMGGSIRVESSLGRGACFNVSLPLPISDHTHFNATVRQPDKTPIKHLKVLVVEDLKTNQMIIKLMLNKVQIEPTIVDNGQKALDLLNVESFDVVFMDCRMPIMDGYTATKELRKKDYSKPIIALTAGTTSAEREACIQAGMNDILCKPYLASELHDILTIWGSAIE

SEQ ID NO: 30142 - protein, 301 aa, Zea mays
  misc_feature (42)..(42): Xaa can be any naturally occurring amino acid
MGNASGREEDAAAVDGDGADVEDGGGDSSVRSSERGFPPYGXGGANHVQRACSVGVVGGGGGAGSPPGSPGHSLSPRMFVPQTPVPPLQRAADVTPVFNQILMNDQEEEYDGPPQKEIPSLIVWTLGGKNVYVEGSWDNWKSRKAMQKSGKDHSLLLVLPSGVYRYRFVVDGERRCLPDLPCETDAMGNAVNLLDVNDFVPESVESVVEFEPPLSPDSSYSFQAPEDKDFAKEPPALPAQLHLGVLNSQNSEESCARPQHIVLNHLFIEKGWGAHPLVALGLTHRFESKYVTLVLYKPIER

SEQ ID NO: 30143 - protein, 558 aa, Sinorhizobium meliloti
MPEAAVKYQPYPQIVLPDRTWPSKAITEAPIWCSVDLRDGNQALVDPMGHDRKARMFHLLLDMGFKEIEIGFPSASQTDYDFARWCVEEGNVSEDVSLQVLVQCRPELIARTFEALEGAHRPIVHFYNSTSELQRRVVFGKDVAGIKQIATDAAKMITDMAAKAGGGYRFEYSPESFTGTELEVALEICNAVIEIVRPTADNKLIINLPSTVEMATPNIYADQIEWMCRNLDNRENLIVSLHPHNDRGTGIAATELGLMAGADRVEGTLFGNGERTGNVDVVTLALNMFTQGVDPKLDCSDIERIKEVYEYSNQMVIPERHPYVGELVYTAFSGSHQDAINKGMKAIKQANKPTWEVPYLPIDPRDVGRSYEAIIRINSQSGKGGIAYILQEDYGINLPRNLQIEFREEVQRITDEEGKELPSKRIHQRFIESYVEQPGARIKFVDHHTYPAGEHKGLRVVAAEITDGGETRQIEGKGTGPIDGFINALSIYLGIELSVADYSEHSLQHGSNAAAIAYVEVEYPGGKLFGVGINTNIVAASLEAIVSAANRVLDVVGK

SEQ ID NO: 30144 - protein, 366 aa, Arabidopsis thaliana
MALSAIGFEGYEKRLEVTFFEPSIFQDSKGLGLRALTKSQLDEILTPAACTIVSSLSNDQLDSYVLSESSFFVYPYKVIIKTCGTTKLLLSIPPLLKLAGELSLSVKSVKYTRGSFLCPGGQPFPHRSFSEEVSVLDGHFTQLGLNSVATLMGNDDETKKWHVYAASAQDSSNCNNNVYTLEMCMTGLDREKAAVFYKDEADKTGSMTDNSGIRKNLPKSEICDFEFEPCGYSMNSIEGDAISTNHVTPEDGFSYASFEAVGYDFNTLDLSQLVTRVLSCFEPKQFSVAVHSSVGANSYKPEITVDLEDYGCRERTFESLGEESGTVMYQTFEKLGKYCGSPRSTLKCEWSSNNSCSSEDEKDEGI

SEQ ID NO: 30145 - protein, 172 aa, Chenopodium rubrum
MNDTDVQKQIQQMVRFIRQEAEEKANEISVAAEEEFNIEKLQLVEAEKKKIRQEYERKEKQVEVRRKIEYSMQLNASRIKVLQAQDDLVNSMKEAAAKELLRVSGDHHHYKKLLKELVVQSLLRLKEPGVLLRCRKDDVHLVEHVLHSAKGEYAEKSRCTYSLDTERRRRRA

SEQ ID NO: 30146 - protein, 356 aa, Chlamydophila abortus S26/3
MFQDRIERAQAALVDYGIDGFIVERSEDLAYFLGDKVTSGTLLIGKNEVVFFVYRMDKDLYADLQGPSLVFCDRNIGEFLLPYLETTTYQILGFDSFHTSFHRYQERENASCSWMPIHLFTEKLRSIKSADEIEKMSQAAALGSEGYDYVLSVLKEGITEKEVVQLLRIFWAKAGAEGPSFSPIVAFGHHSAFPHAMPTDRALRKGDIVLIDIGVLYQGYCSDMSRTVAWGRPDSRLVESYPAVVEAQQEAMKLCRAGALCLDIHEEAARILRKYDLEDYFCHGVGHGVGRNIHEYPVLSPKSGTTTLETGMTVTVEPGVYFPGIGGIRIEDTVLIDGNKNFSLTNRPVSTELVCL

SEQ ID NO: 30147 - protein, 737 aa, Lactuca sativa
MDSCNCIEPQWPADELLMKYQYISDFFIALAYFSIPLELIYFVKKSAVFPYRWVLVQFGAFIVLCGATHLINLWTFNAHTRTVAIVMTTAKVLTAAVSCATALMLVHIIPDLLSVKTRELFLKNKAAQLDREMGIIRTQEETGRHVRMLTHEIRSTLNRHTILKTTLVELGRTLGLEECALWMPTRSGLELQLSYTLRHQNPVGFTVPIQSPAINQVFSTNRAVKISPTSPVARLRPASGKYMLGEVVAVRVPLLHLNNFQIYDWPELSTKRYALMVLMLPSDSARQWHVHELELVEVVADQVAVALSHAAILEESMRARDLLMEQNVALDLARREAETAVRARNDFLAVMNHEMRTPMHAIIALSSLLQETDLTPEQRLMVETILKSSNLLATLINDVLDLSRLEDGSLELDTTTFNLHALFKEVLNLIRPVASVKRLFVTLSLSSDLPEYAVGDEKRLMQIILNIIGNAVKFSKEGSISISAIMAKPDSLRDPRAPDFFPLLSDNNFFLRVQVKDTGMGISQQDMPKLFTKFAESQSPATRNPGGSGLGLAICKRFVNLMEGNIWIESEGLGKGSTAIFFVKLGFPSRLNGSRLPHMRVPAKLGQTKFPGLKVVVVDDNGVSRTATKGLLVHLGCDVTTVSSGEECLQAITKDSYKVVFIDVSLSSDAYNVARLVHEKLPKRHEKPPPLIVGLTGNTDKAMKESLLRAGMDGLVLKPVSVEKMRLALSELLEHNT

SEQ ID NO: 30148 - protein, 548 aa, Magnetospirillum magnetotacticum MS-1
MEMVHPVGLPAWKDLAALAATTGQKPMRDMFAADPGRFGRFSARLGDLLLDYSKNRIDAEVMAALIRLARQAGLAEARDAMFGGETFNITERRAVLHTALRNRSERPVMVDGQDVMPEIRAVLARMKTFAEQVRSGEWKGATGRAIQSVVNIGIGGSDLGPVMVTEALKPYQRDDLAVRFISNVDGSHAAEVLKLCDPETTLFIVASKTFTTQETIANAKTCRAWTVDKLGEAAIPNHFVALSTNARAVADFGIDTANMFEFWDWVGGRYSLWSAIGLSIAVAVGFGRFEELLAGGHAMDEHFRESPLEANLPVILALIGIWNANFLGADAYAVLPYDQYLHRLPAYLQQLDMESNGKGTARDGAMVGWGTGPMVFGEPGTNGQHAFYQLIHQGTRLIPCDFLAAAQTHNPLGEHHLMLLSNVFAQAEALMRGKTEAEARAELEKAGMSTAEIAFQLPHRVFPGNRPSNTLLYPRLDPFMLGQLIALYEHKVFVQGVIWDVNSFDQWGVELGKVLAKAILPELSSSAPVTNHDSSTTGLIEAVRALRR

SEQ ID NO: 30149 - protein, 1566 aa, Ustilago maydis
MSAATPTSPGFPLTMGTGVMAAHFAAPSSNAGSPRSRPTTPLSAGLTPSGPTYDDLGRWDDADVASWLNAARLGHYASIFAEHDIRGSVILDVDQAALKEMGITMVKDRVRISAAIKLLNKRCADSAVARRPSVVSISPLLPLASHPLYAHEGEIEYLQHDHTADPSADGSGSNFGLNSMGMRRGQMRPPPLTLKQSTSRGMPGYASPAGSINQSQGFGLSAARGLTPGAARGSVWNTASSSSATSKPGTPDGALHRKVNSIGGVAAPLAVGASSSLSSSRHPYGHAVHSNRPSTATGASGYSNVPASQSLRSNHTSSSPTATSFGSNINAASARPSTATGAQSYTTNVPGTSSARDGYSPLTPISESNSLGNTPTTPSGIQQQQQSAGYAVGRGPFASSQRYAASSVPSQQQPSSGHTLRHVDSGEGYNLAGYQNPNPPTLEDLKRRTIKFISEEDNTTRIVNVSDCRDAYDVMARVLKKFGKPPSGNSYTPTADQGPTGDELGATETWGIFATSADGQNTKALSDNELLAICHAPQPHDPLRERGLTLRRIPNHLPGEDARKVPVRSGRNKLEAFFGERMPVAQMQPAGPGSGVNADEEDAGSVTISGKKMKRASTVSIMSGLGVGPFSSSSHNTGAGHTHGSTRAEGKLLSKKESKHMSPPPVTSKPSKIRNFFGQRPPSELINTNLADFFPSTDSKALQRTARRSIYGRASASTRSKRNSTWSFVADPDAPPLPNKGSMDGHPTPLERSSISIRERGTTPVIQIGYDSRSEDDHQSNARRTSSGTHSHLHPSLTGPPTLPPVVSRDSLDEWSRDLKAVGSPVTEENAMFQSSRHGHASGSQQHHAAMKHYPSHASGYADRPSISRRASGESARSRRSLASQVRHGLSAARERNADTASLLTVDEITQEVENRRESISLAGAGGGWVVDEDGVPIPIPGSSSPFSSSAAASTRPSSGISSSYVHNGHLEHDDSEGHSDEEANQSSDLEEATRTRKARGVPSKAASIRTVASKRASSVLQAPGDESDRHLGDPMAVARSTTSRASSVSELRRSVHDHGDPSDGESGSDFTDSDLDSDGSETDEDEQANDVYLPSAKPAPIKWHKGALIGAGSFGNVFLGMNAKTGLLMAVKQVELPSGDSHLDQRKKGMLEALEREIKLLKSLEHENIVQYLDSFADDSHLNIFLEYVPGGSIVALLRNYGAFEEPLVRNFVRQILNGLSFLHNRGIMHRDIKGANILVDNKGGIKISDFGISKKVESDLVLATNKGGAGGGGAGGAAHRPSLQGSVFWMAPEVVKQTSYTIKADIWSLGCLVVEMISGTHPWAELNQMQALFQIGMGRKPSLPDEISNECRDFLEKTFELDYNNRPSADELLNHAFMGTEMTFPPSSGADGSGGGDDDAGGSGDAGDGDASTMGMTNDAETGTTRETRETKDGKRPTRSKSTRRLEREKRHKEAAAAAAAATALDTGTPNTPTSHTAAAAAAAAAASASASASASPAVASTSPAPGDAETGSPTNGKSAVPPAGSTGGTPESILTVSIATARGNSTSTALSAADAAFSEEADS

SEQ ID NO: 30150 - protein, 403 aa, Listeria innocua
MKIIVQKFGGTSVQNEKIRLMAFNHIKNALKDGYKVVVVVSAIGRYGDPYATDTLLELIGAKDTKLTAREQDTLLSVGETISASVFTNMLREADIKAEAFSGGQAGIITSNNHLNAKITEVDTKRLKKALETLDVAVVAGFQGITENGDITTLGRGGSDTSAAALGVSLQADYIDIFTDVDGMMTADPRIVEHARSLPRVSYNEVSNMAYQGAKVIHPRAVEIAMTAKVPMRIRSTYLESTGTLVTSLADDSGHFDVKERMVTGVAHVTNLTQIFVKTDTVKAQQQTFKILADAGISLDFINISTDSVIFTVPEEKRRVVKQLLEEANLQTTVREDCAKVSIVGAGITGVPGVTAKIVGALSEKNIPILQSADSHTTIWVLVREEDLISAVNALHDVFCLEIK

SEQ ID NO: 30151 - protein, 129 aa, Chlamydomonas reinhardtii
MGGCLEEQYLEVLAALHSDAVAAATLCRVFSSRERTEEVAFGLNTVFMLFSAALVFIMHGGFAMLEAGAIRSKNAMNILLQTVLDGAASAVMWYLVGFGFAYGIGDNPNGFIGDALFGLSRYSSHNTGT

SEQ ID NO: 30152 - protein, 415 aa, Coccidioides immitis RS
MALQRSMTRLGRRELGRTWRPSRGCGMATVVPPVTQDSTGAKGPTAMVFLNMGGPSTTNDVGDYLSRLFADGDLIPLGRLQSYLGPLISRRRTPKIEKQYAEIGGGSPIRKWSEYQCEEMCKILDKISPETAPHKPYVAFRYAAPLTEEMYAKLLDDGFGRGKGGRAVAFTQYPQYSCSTTGSSLNELWKWRNRLEGRRSNGGTEPTGAIQWSVIDRWPTHHGLVEAFAQNIEAQLKTYPEDRRNSVVLLFSAHSLPMSVVNRGDPYPSEVAATVYAVMQRLNFSNPYRLCWQSQVGPSAWLGAQTSHTVENYVSRGQTDLLLVPIAFTSDHIETLFELDREVIKDAASPGVKRVESLNGHPVFIQGLADLAAEHLRSGDNCSRQMTLRCQGCTSDRCLYQKKFFAGSQYGNLVQ

SEQ ID NO: 30153 - protein, 395 aa, Hordeum vulgare
MALQAATSFLPSALSARKEGAAKDSAFFGVRLADGLKLDATSLGLRTKRVNTSSVAIRAQAAAVSAPTATPASPAGKKTVRTGNAIITGASSGLGLATAKALAESGKWHVIMACRDYLKTARAARAAGMPKGSYTIVHLDLASLDSVRQFVKNVRQLDMPIDVVVCNAAVYQPTAKEPSFTADGFEMSVGVNHLGHFLLARELLEDLKASDYPSKRLIIVGSITGNTNTLAGNVPPKANLGDLRGLAAGLNGVGSAAMIDGAEFDGAKAYKDSKVCNMLTMQEFHRRYHEETGVTFASLYPGCIATTGLFREHIPLFRLLFPPFQKYITKGYVSEEEAGKRLAQVVSEPSLTKSGVYWSWNKNSASFENQLSEEASDTEKARKVWELSEKLVGLA

SEQ ID NO: 30154 - protein, 972 aa, Vibrio fischeri ES114
MIPALLLFPKCFNIMLFASTGIGRKLLITFMVMIALMAFGSVVGVLGFSYVEKTERTVIDSAIPAVIEARYISDLSTKIISTSQLLSQVDSEDDRKKYGKDLFESIESLYHRLKGLGVYPFDKALLARLDLQVQDIVDNLATMGESVGEKVVLHRTIQEKSQKLTETALRLEELSRSQVLNSNTVTIANVVKIYDLVENGEKEAVYKALDTLVETDLDLAERLHELRLLTFKVVNTIDDARNSHNIKKIEKLRQDFTRDMTIITRRVQAVEDPSRTKQMLDLANDLTKSERLFNELIQLVNINQKLKLLGDENVHKFQELNLTISQLLEQANDVTQQAVADVNFVLKVVQQLLISITMLGLCLVIYIMWRYVYARVITRLNQYEEAITNVANGQLDIELDTTGDDELARMGRSILIARDTAQELKEYKDSLELQIAQRTQELKSSNERLNVEIINHDKARDLAEQANRAKSAFLATMSHEIRTPLNGVLGTGELLRGSGLTAQQKQYVDIINRSGENLLDLLNDILDYSKIEAGHLSIRKKNFSVQSMITDVHHLFSSRAQQKGITLSVNVPVDTPEWWSGDCSRIRQVLNNFVGNAIKFTHTGSVTIQLSLILDTTLLFEVIDTGVGIAEHEIDTLFDVFTQAEEGMKVSGGTGLGLAISQRLIEAMDGEIGVESIEGQGSTFWFSLELDEGQPVESLSDDKTAIDIAPVNILLVEDNPVNQMVAIGFLERLGHHVIAVDTGKKAEEAIEKHQFDLLLLDINLPDTDGVTLQKRLREIYATKDDHQDELPMLAVSAHVFHEDVESYLSAGFNGFLAKPLVENQLVSTLNRILNDGKSNLKAPVIIPSLQLEMEAGIETEENEMILNEKVLQGDINVLGEDRMRKIVGVFKTSSKENLEELQTAISNQDCYQVNQLAHKLKGSAGSMGLMQLHTLCHQYEQYGKNNDISLCRNDEISQVYGAAILALDAFFK

SEQ ID NO: 30155 - protein, 421 aa, Neisseria meningitidis MC58
MSEALAKETLNPFEIARKQVKTACDRLKTDPAVYEILKSPTRVLEVNFPVKLDDDTVKTFTGYRSQHNNAVGPYKGGVRFHPSVNLDEVKALSIWMTIKCCVAGIPYGGGKGGITLDPRDYSEAELERIARAYAEAIAPLIGEKIDIPAPDVNTNGKIMSWMVDAYENVVKHSAPGVFTGKPVEFGGSLARTEATGYGVNLAAVQALEKLGKDVKGATYAIQGFGNVGYHTGYYAHQSGAKVVAVSTVDVAIYNENGLDMEALFKEFQEKGFITNEAGYGKEITNAELLALDVDVLAPCALENQLTSENAGKVRAKIVVEGANGPTTPEADVILRQNGVLVVPDILANCGGVVVSYFEWVQNLQGYYWEFDEVQEKETVVLRRAFRDIWNLAQEYDVDLRTASYMMSIRRVEKAMKLRGWY

SEQ ID NO: 30156 - protein, 108 aa, Vibrio angustum S14
MSDKIVQLTDASFDTDVINAAGPVLVDFWAEWCGPCKMIAPILDEIADEYEGKLTIGKLNIDQNAETPPKFGIRGIPTLLLFKDGGVAATKVGALSKTQLKEFLDANL

SEQ ID NO: 30157 - protein, 176 aa, Arabidopsis thaliana
MGNALVKKEPPPPVVLVPPLFDYPPLSARTRMLESSYNLLFGKLALRCLFEDYFEEANRFTGKFLLKPTDDPHVDLVASVSGAVDGRVEGDFVGNAEFRWQSDVDDPHTFVDLSVSTSNPVLLMRSSAYYPKYGIGAFAVYPLISKITGKSSEEYRIMGLRYGSTKLSVGATVTSF

SEQ ID NO: 30158 - protein, 147 aa, Xanthomonas smithii subsp. smithii
MSQQVIIFDTTLRDGEQALQASLSVKEKLQIALALERMGVDVMEVGFPVSSPGDFESVQTIARQVKNSRVCALARCVEKDIDVAAESLKVAEAFRIHTFIATSPMHIATKLRSTLDEVIERAIYMVKRARNYTDDVEFSCEDAVTSS

SEQ ID NO: 30159 - protein, 495 aa, Salmonella enterica subsp. enterica serovar Typhi str. CT18
MSRNTEATEEVGIWTGGRLNYKEGFFTQLPTDELAKGISEEVVRAISAKRNEPDWMLEFRLNAYRAWLDMDEPHWLKAHYDKLNYQDYSYYSAPSCGNCDDSCVSQPGAVQQTGANTFLSKEVEDAFEQLGVPVREGKEVAVDAIFDSVSVATTYREKLAEQGIIFCSFGEAIHDYPDLVRKYLGTVVPGNDNFFAALNAAVASDGTFIYVPKGVRCPMELSTYFRINAEKTGQFERTILVADEGSYVSYIEGCSAPVRDSYQLHAAVVEVIIHKDAEVKYSTVQNWFPGDNNTGGILNFVTKRALCEGENSKMSWTQSETGSAITWKYPSCILRGDNSIGEFYSVALTSGHQQADTGTKMIHIGKNTRSTIISKGISAGHSQNSYRGLVKIMPTATNARNFTQCDSMLIGADCGAHTFPYVECRNNSAQLELEATTSRIGEDQLFYCLQRGISEEDAISMIVNGFCKDVFSELPLEFAVEAQKLLAISLEHSVG

SEQ ID NO: 30160 - protein, 110 aa, Streptococcus pyogenes SSI-1
MKWRKKMALEVTDATFVEETKEGLVLIDFWATWCGPCRMQAPILEQLSQEIDEDELKILKMDVDENPETARQFGIMSIPTLMFKKDGEVVKQVAGVHTKDQLKAIIAELS

SEQ ID NO: 30161 - protein, 383 aa, Synechococcus elongatus PCC 6301
MRGGGSSTVKIADFRRSPMTRSYRITLLPGDGIGPEIMAVTVDILRAIGRQFDLNFEFEEALIGGSAIDATGEPLPEATLATCRNSDAVLLAAIGGYKWDSLPRSQRPETGLLGLRAGLGLFANLRPAAILPQLVDASSLKREVIEGVDLMVVRELTGGIYFGEPKGCFADEQGRQRAFNTMVYREDEIDRIGRVAFDIARKRGKRLCSVDKANVLEVSQLWRDRMTLLGSDYADVELSHLYVDNAAMQLVRWPKQFDTIVTGNLFGDILSDIAAMLTGSIGMLPSASLGAEGPGVFEPVHGSAPDIAGQDKANPLAQVLSAAMMLRYGLDEPEAAARIEAAVNQVLDQGYRTGDLYSEGMTLVGCKGMGDALLAALESPVSA

SEQ ID NO: 30162 - protein, 675 aa, Arabidopsis thaliana
MEEISTDPVVPAVKPDPRTSSVGEGANRHENDDGGSGGSEIGAPDLDKDLLCPICMQIIKDAFLTACGHSFCYMCIITHLRNKSDCPCCSQHLTNNQLYPNFLLDKLLKKTSARHVSKTASPLDQFREALQRGCDVSIKEVDNLLTLLAERKRKMEQEEAERNMQILLDFLHCLRKQKVDELNEVQTDLQYIKEDINAVERHRIDLYRARDRYSVKLRMLGDDPSTRNAWPHEKNQIGFNSNSLSIRGGNFVGNYQNKKVEGKAQGSSHGLPKKDALSGSDSQSLNQSTVSIARKKRIHAQFNDLQECYLQKRRQLADQPNSKQENDKSVVRREGYSNGLADFQSVLTTFTRYSRLRVIAEIRHGDIFHSANIVSSIEFDRDDELFATAGVSRCIKVFDFSSFVNEPADMQCPIVEMSTRSKLSCLSWNKHEKNHIASSDYEGIVTVWDVTTRQSRMEYEEHEKRAWSVDFSRTEPSMLVSGSDDCKVKVWCTRQEASVINIDMKANICCVKYNPGSSNYIAVGSADHHIHYYDLRNISQPLHVFSGHKKAVSYVKFLSNNELASASTDSTLRLWDVKDNLPVRTFRGHTNEKNFVGLTVNSEYLACGSETNEVYVYHKEITRPVTSHRFGSPDMDDAEEEAGSYFISAVCWKSDSPTMLTANSQGTIKVLVLAA

SEQ ID NO: 30163 - protein, 173 aa, Triticum aestivum
MATVMAMSSLAGAAAVLPRGSAGRLGAKSLPALGRRALVVRAQTEGPSAPPPNKSKTSTSIWDALAFSGPAPERINGRLAMVGFVTALAVEAGRGDGLLSQLGSGTGQAWFAYSVAVLSVASLVPLLQGESAEGRPGAIMNANAELWNGRFDMVGLVALAATEIITGAPFINV

SEQ ID NO: 30164 - protein, 966 aa, Mesembryanthemum crystallinum
MSTVKLDRLTSIDAQLRLLAPKKVSEDDKLIEYDALLLDRFLDILQNLHGEDIKETVQELYEQSAEYERTHDPKKLEELGSMVTSLDAGDSIVVAKSFSHMLNLANLAEEVQISRRKRVKKVKKGDFMDENTAMTESDMEETLRRLIVDLKKSPQEIFETLKNQTVDLVFTAHPTQSVRRSLLQKHGRIRDCLAQLYAKDITPDDKQELDEALQREIQAAFRTDEIRRTQPTPQDEMRAGMSYFHETIWNGVPKFLRRLDTALKNIGITERVPYNAPLIQFSSWMGGDRDGNPRVTPEVTRDVCLLARMMAANMYFSQIDELMFELSMWRCTDELRERAEELHKYSKRDSKHYIEFWKQIPSSEPYRVILADVRDKLYYTRERSRQLLASEVSEIPVEATFTEIDQFLEPLELCYRSLCACGDRPVADGSLLDFMRQVATFGLCLVKLDIRQESERHTDVMDAITTHLGIGSYRDWTEEKRQDWLLSELRGKRPLFGPDLPRTDEIADVLDTINVIAELPSDSFGAYVISMATAPSDVLAVELLQRECKVKKPLRVVPLFEKLADLEAAPASMTRLFSVDWYKNRIDGKQEVMIGYSDSGKDAGRLSAAWQMYKVQEELLKVSKKFGVKLTMFHGRGGTVGRGGGPTHLAILAQPAETIGGSLRVTIQGEVIEQSFGEQHLCFRTLQRYTAATLEHGMNPPKSPKPEWRALLDQMAVVATEEYRSIVFKEPRFVEYFRLATPETEYGRMNIGSRPSKRKPSGGIESLRAIPWIFAWTQTRFHLPVWLGVGGALKHVLEKDIRNHNMLRDMYNNFPFFRVTIDLLEMVFAKGDPEIAALYDKLLVSEELQSFGERLRANYEDTKRRLLEVAGHKDLLEGDPYLKQRLRLRDPYITTLNVCQAYTLKRIRDPDFKVTERPHLSKEIMDAHKAAAELVKLNPTSEYAPGLEDTLILTMKGVAAGLQNTG

SEQ ID NO: 30165 - protein, 1209 aa, Synechocystis sp. PCC 6803
MINSGTLITKIEELQSTLAKMDIALGTVDEAIVWTDGTGQIQWCNTAFDHLMGKLHILILGKNLVELLPLHRNSQPLEVSHHPFTIIVATQQKFTDHYEFNQNGKWLHLEIMTSPLMNAQGAVLVIRDISDRHLQEQTLQQLNENLEKRVLERTQAVSLINNKLEQELRERKKTEIALKATTSRLEALIQNLQAGVLVENENGKIVLVNQVFCDLFGIDVPPEKLIGFDCRQSAQFAKILFEDPEAFIIGIDNILQNRQIVTNEELRLKDGRTFARDYVPIEVGNHHDGRLWLYRNITPQKQAEVSLRKQYQRTLLLKEITEEIRQSLDPVKIFQVAVSRLGQTLQVSRCIVHLYSDMPQPHLTCVAEYLIPGMTSMLDLNLLIADNPHLLRALNQDDAVQVDNLKMVPTAVPLQDFYNQLQVYSLLIIRTSYQDKTNGLLILHQCDRSRSWNTEEVELVKAVADQVGIALAQAKLLEQEREIRQQLIEQNKALMTATKAAEDANRAKSDFLATMSHEIRTPMNAVIGMTGLLLDTHLNTQQQQFTETIRSSGEALLSLINDILDFSKIESGQFKLEIHPFEIQQCVEECLDLVAPQAFAKKLDLVYQIEPQVPMAILGDLTRVRQVLVNILANAVKFTTSGSIQVRVSATVANQQQNKYTIQFSIKDTGIGISPDQQSALFKSFSQVNTSIARKYGGTGLGLAICKRLTEMMGGQIWVESYGEIAGNPPVDWAKTSKNNPLESTGATFYFTITAQSTTIVRRPNDLSCQLSLAGKRLLIVDDNQLSCEGLKQLVTAWGLQAQATTSGWEAFSWLRQGECFDLAIIDLQMEEVDGLQLAEALRTLPTGESLPLVILTPSPTSLAELSARTDISIAACLSSPIKKSLVYEVLCEVFKADETDNSLFNGDWRSGITEAVKRTCSPQEREARIKTLSPLRILLVEDNNINQRVALLMLEKLGYRPDIAGNGLEALQVLHQASYDVILMDVEMPEMDGLSATKAIRQDFPADEQPWIIAVTAYAMQGDRETCLAAGMNDYITKPIRENDLLDALQRIDFSVLSLTKNKPAPLSEPVVNVGLVNPVPEVLKADQLEENLVLDLSILTGIREMAGPDGATFLQVIIGDYLHTTPSLLEKLKTAIAAQEIDTVRATAHSLGSSSANLGAVEFAKQCKQLENLARSGMLSGVDGQYIQLEKEYEKVSQALALQLNPN

SEQ ID NO: 30166 - protein, 121 aa, Chenopodium rubrum
MAASVVMSSLSLKPSSFNVDTKAAVKGLPSLSRSSTSFTVRASGGKKIKTDKPSGKGVYQFVDKYGANVDGYSPIYNEEEWSPSGDVYTGGTTGLLIWAVTLAGLLAGGALLVYNTSALAQ

SEQ ID NO: 30167 - protein, 482 aa, Staphylococcus aureus subsp. aureus MRSA252
MGSFFNKIARKEDPAIYQNKDGHLKRTLRVRDFLALGVGTIVSTSIFTLPGIVAAEHAGPAVALSFLLAAIVAGLVAFTYAEMAAAMPFAGSAYSWVNVLFGEFFGWVAGWALLAEYFIAVAFVASGFSANLRGLVKPIGIELPAALSNPFGTNGGFIDIIAAIVILLTALLLSRGMSEAARMENILVILKVLAIILFVIVGLTAINVSNYVPFIPEHKVTATGDFGGWQGIYAGVSMIFLAYIGFDSIAANSAEALDPQKTMPRGILGSLSIAIVLFIAVALVLVGMFHYSQYANNAEPVGWALRQSGHGVVAAIVQAISVIGMFTALIGMMLAGSRLLYSFGRDGLLPSWLSHLNDKHLPNRALVILTIIGVLIGSMFPFAFLAQLISAGTLVAFMFVSLAMYRLRKREGKDLPIPAFKLPLYPVLPAVTFVLVLLVFWGLGFEAKLYTLIWFIVGIILYLSYGLRHSKKNDVAEYHPPK

SEQ ID NO: 30168 - protein, 643 aa, Desulfovibrio gigas
MCGIAGFVLLQDAPPVTDHQARDVLAAMAGRIAHRGPDGRGHHVGLPAAFAHCRLAIIDLSTGAQPMAAEDGAAVVTFNGEIYNYQEVRRELQALGRTFQTRSDTEVLLQAYLEWGVACLDRLEGMFAFALWDVRRRTLFAARDRFGKKPFFYTIQQGVFAFASELSALEAVPWAAFSIRASTLARFLAYEYVPTPESIYAEARKLPPAQYLELHEDGTLLVERYWETPMPRPEGSKGFGRADEPALCEELRRLLTQAVRRRLIADVPVGVFLSGGVDSSSVAAMAGQLAPGIKTFSIGFTEASYDESAYAGRVAAQLGTDHQLELLSADACADLLPEVVSRFDEPMADPSIVPTYLLSQITRRQVTVALGGDGPDELLAGYEYYPGFKATQYWERLPAWLRRAAVAASGLLPGSAGYVNPRHVAQTFLAAAEAPAWLRTQRMLTALTPEAQRALWKSPGDMLEPTRLFASTKRLWEALPDWPPMARVFHLFAQQITYGYILVKVDRCTMLHGLEARAPFLDRDLAEFCFRLPVSMKLRGATRKYLLKEAMAGLLPQDILHRPKRGFLIPTAAWLRGRLRPLVDDLLHERRLREQGLFHPAAVRRLVEEHASGKKDHRKGLWTMLVLQLWLAGKPAVRIDPER

SEQ ID NO: 30169 - protein, 320 aa, Debaryomyces hansenii CBS767
MLTLAIGDIYIPDRAFELPLKFRKLLCPNPNTIPTNNKLSKVLCLGNITNSYDTLKFLYDLSPSFNMVGGEFDNSQILSQQIALLNGKESQVPTYNIIQHDNLRIGFTNGYLVVPKNDPLALLTLAREIDVDILIWGGTHKVEAYTLDGKFFINPGSATGAYNFDWPEKEDESEEEEEEGESQKDSKEGNSEPAKEESKEKEIAEEESKKDEENNADKKDEIESNEQENKEGAHEEVKEPSEQKNVDSKDNEGVVEKNKNKEDANDSDSDDTNLIEEVKESTSSIPSFCLLDTHDSTCTLYIYTYFHGEVKVDKVTYQKE

SEQ ID NO: 30170 - protein, 614 aa, Arabidopsis thaliana
MNSLVRRKQVDSVHLIKNDGPHQLAKKLSAVDLVAIGVGTTIGAGVYILVGTVAREHTGPALAVSFFIAGVAAALSACCYAELASRCPSAGSAYHYAYICLGEGIAWLVGWALVLDYTIGGSAIARGITPNLVFAFELYVFGFSQEASFFGGLDNLPVFLARQTIPGVGIVVDPCAALLIMIVTILLCFGIKESSTVQAIVTSVNVCTLVFIIVVGGYLACKTGWVGYDLPSGYFPFGLNGILAGSAVVFFSYIGFDTVTSTAEEVKNPQRDLPLGIGIALLICCILYMLLSVVIVGLVPYYSLNPDTPISSAFGDSGMQWAAYILTTGAITALCASLLGSLLAQPRIFMAMARDGLLPAFFSEISPRTQVPVKSTIAIGVLAAALAFFMDVAQLSEMVSVGTLMAFTAVAVCVLVLRYVPPDGVPLSSSSQTLSDTDESRAETENFLVDAIESSDSPLLGNETARDEKYFGKRRKIAAWSIALVCIGVLGLASAASAERLPSFPRFTICGVSAVILLGSLITLGYIDEDEERHNFGHKGGFLCPFVPYLPVLCILINTYLIINIGAGTWIRVLIWLLIGSMIYIFYGRSHSLLNNAVYVPTMTCTRKTTDHLA

SEQ ID NO: 30171 - protein, 964 aa, Arabidopsis thaliana
  misc_feature (441)..(441): Xaa can be any naturally occurring amino acid
MAARNLEKMASIDAQLRLLAPGKVSEDDKLIEYDALLLDRFLDILQDLHGEDVREFVQECYEVAADYDGNRNTEKLEELGNMLTSLDPGDSIVVTKSFSNMLSLANLAEEVQIAYRRRIKKLKKGDFADEASATTESDIEETLKRLLQLNKTPEEVFDALKNQTVDLVLTAHPTQSVRRSLLQKFGRIRDCLTQLYAKDITPDDKQELDEALQREIQAAFRTDEIRRTPPTPQDEMRAGMSYFHETIWKGVPKFLRRVDTALKNIGINERVPYNAPLIQFSSWMGGDRDGNPRVTPEVTRDVCLLARMMAANLYFSQIEDLMFEMSMWRCNEELRVRAERQRCAKRDAKHYIEFWKQIPANEPYRAILGDVRDKLYNTRERARQLLSSGVSDVPEDAVFTSVDQFLEPLELCYRSLCDCGDRPIADGSLLDFLRQVSTFGXLALVKLDIRQESERHSDVLDAITTHLGIGSYKEWSEDKRQEWLLSELSGKRPLFGPDLPKTEEVADVLDTFKVISELPSDSFGAYIISMATAPSDVLAVELLQRECGITDPLRVVPLFEKLADLESAPAAVARLFSIEWYRNRINGKQEVMIGYSDSGKDAGRLSAAWQLYKTQEELVKVAKEYGVKLTMFHGRGGTVGRGGGPTHLAILSQPPDTIHGQLRVTVQGEVIEQSFGEEHLCFRTLQRFTAATLEHGMHPPVSPKPEWRVLMDEMAIIATEEYRSVVFKEPRFVEYFRLATPELEYGRMNIGSRPSKRKPSGGIESLRAIPWIFAWTQTRFHLPVWLGFGGAFKRVIQKDSKNLNMLKEMYNQWPFFRVTIDLVEMVFAKGDPGIAALYDRLLVSEELQPFGEQLRVNYQETRRLLLQVAGHKDILEGDPYLRQRLQLRDPYITTLNVCQAYTLKQIRDPSFHVKVRPHLSKDYMESSPAAELVKLNPKSEYAPGLEDTVILTMKGIAAGMQNTG

SEQ ID NO: 30172 - protein, 475 aa, Streptococcus mutans
MTKQYKNYVNGEWKLSENEIKIYEPASGAELGSVPAMSTEEVDYVYASAKKAQPAWRALSYIERAAYLHKVADILMRDKEKIGAILSKEVAKGYKSAVSEVVRTAEIINYAAEEGLRMEGEVLEGGSFEAASKKKIAVVRREPVGLVLAISPFNYPVNLAGSKIAPALIAGNVIAFKPPTQGSISGLLLAEAFAEAGLPAGVFNTITGRGSEIGDYIVEHQAVNFINFTGSTGIGERIGKMAGMRPIMLELGGKDSAIVLEDADLELTAKNIIAGAFGYSGQRSTAVKRVLVMESVADELVEKIREKVLALTIGNPEDDADITPLIDTKSADYVEGLINDANDKGATALTEIKREGNLICPILFDKVTTDMRLAWEEPFGPVLPIIRVTSVEEAIEISNKSEYGLQASIFTNDFPRAFGIAEQLEVGTVHINNKTQRGTDNFPFLGAKKSGAGIQGVKYSIEAMTTVKSVVFDIK

SEQ ID NO: 30173 - protein, 95 aa, Halobacterium salinarum
MANQSSTGSAGRFGARYGRVSRRRVSDIEGTMNEDHACPDCGSEAVSREGTGIWQCGKCGYKYAGGAYQPQTPSGKTVTRSIRTALGETGDSNSE

SEQ ID NO: 30174 - protein, 497 aa, Pseudomonas fluorescens PfO-1
MSVIPHLINGELVTENGRAVDVFNPSTGQAIHKLPLASRETIQHAIDAAKAAFPAWRNTPPAKRAQVMFRFKQLLEQNEARIAQLISEEHGKTLEDAAGELKRGIENVEFACAAPEILKGEYSRNVGPNIDAWSDFQPLGVVAGITPFNFPAMVPLWMYPLAIVCGNCFILKPSERDPSSTLLIAQLLLEAGLPKGVLSVVHGDKTAVDALIEAPEVKALSFVGSTPIAEYIYAEGTKRGKRVQALGGAKNHAVLMPDADLDNAVSALMGAAYGSCGERCMAISVAVCVGDQVADALVAKLVPQIKALKIGAGTSCGLDMGPLVTGQARDKVSGYVEDGVAAGATLVVDGRGLSVAGHEEGFFLGGCLFDNVTPEMRIYKEEIFGPVLCVVRVNSLEEAMQLINDHEYGNGTCIFTRDGEAARLFCDEIEVGMVGVNVPLPVPVAYHSFGGWKRSLFGDLHAYGPDGVRFYTRRKAITQRWPQRASHEASQFAFPSL

SEQ ID NO: 30175 - protein, 535 aa, Triticum aestivum
  misc_feature (263)..(263): Xaa can be any naturally occurring amino acid
  misc_feature (294)..(294): Xaa can be any naturally occurring amino acid
ADPNGPMYHNGLYHFFYQYNPDGVTWGNGNLSWGHSVSVDLVNWFALDAALQPSRSFDANGCWSGSATILPDGSPVMLYTGIDARGDQVQNVAYPKNASDPLLVDWVKPEYNPVIPVPADIKRDDFRDPSTAWLGADGVWRIAVAARVHDVGGATLIYRSKDFLRWERNADPLYLAHAAGMVECPDLFPVSEPGVEVGLPASGAGARHVLKMSVMDTVQDYYVVGRYDDAADTFVPEDDEDCRSWRRLDYGHVYASKSFFDPXARTGACSGAGPTSPTACPTISSGDGPVFRLXPRKIWLDEDGKQLRQWPVEEIETLRSKRVNLLIPEVNAGGVNEIIGVMGAQADVEVVFEVPPLEHADVLEPNWLLDPQSLCGEKGASVPGSVGPFGLLVMASGDMQEHTAVFFRVFRQNDKYKVLMCTDLSRSSTRDGVYKPPYGAFVDMDIEAHGGIISLRTLVDHSVVESFGGGGRACITARVYPDHVVNGNSHLYVFNNGTGAVKVSSLDAWEMATATVNVLPDGLIAASSVSRAQAY

SEQ ID NO: 30176 - protein, 538 aa, Sulfitobacter sp. EE-36
MTRERLYLYDTTLRDGQQTQGVQFSTAEKITIASALDTLGVDYIEGGWPGANPTDSAFFDAAPTTRAKMTAFGMTKRNGMSAQNDDVLAAVMNAGTRTVCLVGKTHDFHVSAALGITLDENTDNIVKSIAHLVAQGREALFDAEHFFDGYRANPDYALTAIKAAYEAGARWIVLCDTNGGTMPAEVGRITAEVIAAGIPGDHLGIHTHNDTENAVACSLAAIDAGARQIQGTLNGLGERCGNANLTTLIPILLLKEPYASRFDTGIPIDGLANLTQISRALDEILNRVPTKQAAFVGSSAFAHKAGLHASAILKDPSTYEHIDPALVGNTRIIPMSNQAGQSNLRRRLESAGLTIAKGDPALGQILDEVKAREAEGYSYDTAQASFELLARKALGQMPDLFEVKRYRVTVERRKNKYDQMVSLSEAVVVVKVDGEKRLSVSESMDAEGCDRGPVNALSKALVKDLGQYSALLEDMHLVDFKVRITQGGTEAVTRVIIDSEDGQGRRWSTVGVSANIVDASFEALLDAIRWKLIRDRKG

SEQ ID NO: 30177 - protein, 139 aa, Rubrobacter xylanophilus DSM 9941
MPAAFIHTCYRITDPERTIDFYVNKLGMKKVGEMHFSDATNYFFAMEEDPSSPMLELTHNHDRTGPYEKGEGYSHIAFTVDDLEGTVARLAEQGVKVAVEPKTLTVDGHDYRIAFVEDPDGYRVELVQRGTMKVGDMLQ

SEQ ID NO: 30178 - protein, 112 aa, Ralstonia eutropha JMP134
MKQITAIIKPFKLDEVRESLADVGVTGLTVTEVKGFGRQKGHTELYRGAEYVVDFLPKIKIEVVVAENQLDTVLDAVVKAAHTGKIGDGKIFVTEIERVIRIRTGEQDEAAV

SEQ ID NO: 30179 - protein, 411 aa, Frankia sp. CcI3
MQRIVVVGAGMAGGRAAAEVRARGFAGEVILLGAEPHRPYDRPPLSKAVLSGRIDDTTLPFDLDGVEVRLGRRATGLRPGTVETDAGPLDYDGLVLATGADPVTLPGDGPQRVLRSIDDARDLRGALRPGVRLVIVGAGWIGAEVATAAAAIGAEVTVVEAAASPLFAALGAQVGRCTIAWYARAGVTLRLATAVERVTPDGLVLAGGEELIADEVVVGVGVRPGTAWLAGSGLALDRGVVVDEHLAARWTHGADGADGDRPPVVAVGDCAAWWSRRYGRRLRVEHWDCAQQSPAVAVSTLLGGEAVYDPVPYFWSEQFGRMVQFAGLPSAEAAPVFRGDPGVVVPPDGGRPSGWSAGWFAPDGRLEALVTVGRPMDMVAGRRLMAADGIPDRERFADISVSMKELAAASR

SEQ ID NO: 30180 - protein, 461 aa, Novosphingobium aromaticivorans DSM 12444
MAIELKMPALSPTMEEGTLAKWLVKAGDEVRSGDILAEIETDKATMEFEAVDEGVIAEILVAEGTEGVKVGTVIATIQGEGEDAAPAAATPAVEQKVEMSEAAPSVEARAAPAVAIAPKVDAKPAVDPEIPAGTAMVPTTVREALRDAMAEEMRADDRVFVMGEEVAEYQGAYKVTQGLLDEFGPRRVIDTPITEYGFAGIGAGAAMGGLRPIIEFMTFNFAMQAIDHIINSAAKTNYMSGGQMRCPIVFRGPNGAASRVGAQHSQNYGPWYANVPGLVVIAPYDSADAKGLMKAAIRSEDPVVFLENELVYGRTFDVPQMDDFVLPIGKARIVRQGKDVTIVSYSIGVGLALEAAETLAAEGIDAEVIDLRTLRPLDKDTVLASLAKTNRLVVAEEGFPVCSIASEIMAICMEDGFDHLDAPVLRVCDEDVPLPYAANLEKAALIDAGKIAAAVRKVCYR

SEQ ID NO: 30181 - protein, 229 aa, Lactobacillus johnsonii NCC 533
MKRKLAKLVLVRHGESVANRDNVYTGWNDVPLSKKGIAQAKNAGLKVEKIAEFAPTHIHTSVLSRAIMTANIIADVCSFLYLPITKTWRLNERHYGALRGINKDVSKKIFGTNQVLEWRRGFDSVPPLLTQPVQDRRYQKYDMRLMPQGESLHQTQERLMPYFWDHIAPELMAGHDQLVVAHGSSLRALIKKIEDISNEDIVKVEVPNAEPIVYTFDTDLHIVKKEILH

SEQ ID NO: 30182 - protein, 340 aa, Burkholderia cepacia
MSSYKIALNFEDGVTRFIDCKAGEKVLDAAFRAKINLPMDCSDGVCGTCKCRAESGRYDLGDDYIDDALTEDEKDGGLVLTCQMVPQSDCVIAVPTSSVACKTGQSGFAATVTKVEQHNDAAVVLELDVGAAARVFLPGQYVNIDVPASGQHRSYSFSSAPADAKVSFLIKKIPGGVMSTWLESAQPGDTLELHGPLGSFYLRDVQRPLLFLAGGTGLAPFLSMLEVLARSGSQQRVHLIYGVTRDLDLVLVDAIEAYAAKLPNFSFATVVADAASNHPRKGWVTQHIPADALNDGDVDVYLCGPPPMVDAVRKYFDDEGVKPNSFHYEKFTPNVTAKAA

SEQ ID NO: 30183 - protein, 539 aa, Arabidopsis thaliana
  misc_feature (93)..(93): Xaa can be any naturally occurring amino acid
  misc_feature (108)..(108): Xaa can be any naturally occurring amino acid
MASRIINHSKKLKHVSALLRRDHAVAVRCFSNSTHPSLVGREDIFKARLNYSSVERISKCGTGNVTMLSGISTTSTKLSSPMAGPKLFKEFIXLPDAISERIFIQFRXPPHQEIGMPSLSPTMTEGNIARWLKKEGDKVAPGEVLCEVETDKATVEMECMEEGFLAKIVKEEGAKEIQVGEVIAITVEDEDDIQKFKDYTPSSDTGPAAPEAKPAPSLPKEEKVEKPASAPEAKISKPSSAPSEDRIFASPLARKLAEDNNVPLSSIKGTGPEGRIVKADVEDFLASGSKETTAKPSKQVDSKVPALDYVDIPHTQIRKVTASRLAFSKQTIPHYYLTVDTCVDKMMGLRSQLNSFQEASGGKRISVNDLVIKAAALALRKVPQCNSSWTDEYIRQFKNVNINVAVQTENGLYVPVVKDADKKGLSTIGEEVRFLAQKAKENSLKPEDYEGGTFTVSNLGGPFGIKQFCAVINPPQAAILAIGSAEKRVVPGTGPDQYNVASYMSVTLSCDHRVIDGAIGAEWLKAFKGYIETPESMLL

SEQ ID NO: 30184 - protein, 398 aa, Legionella pneumophila str. Lens
MFELMESSQQENNAVIKVVGVGGGGGNAVEHMVAENIDGVEFICANTDAQALRGSSAKIHIQLGDALTKGLGAGANPQIGREAAEEDREHIKEILSGADMVFITAGMGGGTGTGAAPVFAEIAKELGILTVAVVTKPFSFEGKQRALAAEEGIRRLAEHVDSLITIPNNKLLSVLGKNISLLNAFKAANNVLLGAVKGISDLITRPGLINVDFADVRTVMSEMGMAMMGTGSAVGEQRARQAAEAAIASPLLEDVNFSGARGILVNITAGLDMSIGEFEEVGDVVKEFISDDATVVVGTVIDPEMTDEMRVTVIVTGLGDNRQRQQQPQQPLRARLVETTRSDGSLDYQQLERPAVIRKQAQTGTGTTATKQTNNGNENVPDVDYLDIPAFLRRQEEA

SEQ ID NO: 30185 - protein, 477 aa, Neisseria meningitidis MC58
MNEYSQLIKHPDISLPPVSDGIKVDNPATGETLAFVRKTDSDKLKNLIQKAAAAQKLWAAKTALERADVLWRWYFQIKENKEALARLMTMEQGKSLTEARGEIDYAASFVRWFAEEARRIDGDVLTSVKASQKLVVLKQPVGVTAAITPWNFPSAMIARKAAPALAVGCAMIVKPASLTPLSAYALASLAYEAGIPQDLLPVVSGSASEIGHEFATNPIIRKISFTGSTEVGAKIFADSAADIKKLSLELGGNAPFIVFDDADLDKAVEGALASKFRNSGQTCVCTNRVYAQSAIYDEFCRKLSEKAAALKLGNGLEDGVNQGPLIEEKAVEKVEQHIADALAKGASCLTGGKRSALGGTFFEPTVLSGVTAQMAVAREETFGPLCPVFRFETEAEVIEAANNTEYGLAAYLFTADTARQWRVGEALEYGMVGINTGLISNEAAPFGGVKRSGLGREGSKYGADEYLELKYLCMDVG

SEQ ID NO: 30186 - protein, 67 aa, Brassica napus
EKGNKKLGIRKEDLPKYEENLELSIAKAQLDELKSDALEAMESQKKKEEFKDEEMPDVKSLDIRNFM

SEQ ID NO: 30187 - protein, 970 aa, Zea mays
MASTKAPGPGEKHHSIDAQLRQLVPGKVSEDDKLIEYDALLVDRFLNILQDLHGPSLREFVQECYEVSADYEGKGDTTKLGELGAKLTGLAPADAILVASSILHMLNLANLAEEVQIAHRRRNSKLKKGGFADEGSATTESDIEETLKRLVSEVGKSPEEVFEALKNQTVDLVFTAHPTQSARRSLLQKNARIRNCLTQLNAKDITDDDKQELDEALQREIQAAFRTDEIRRAQPTPQAEMRYGMSYIHETVWKGVPKFLRRVDTALKNIGINERLPYNVSLIRFSSWMGGDRDGNPRVTPEVTRDVCLLARMMAANLYIDQIEELMFELSMWRCNDELRVRAEELHSSSGSKVTKYYIEFWKQIPPNEPYRVILGHVRDKLYNTRERARHLLASGVSEISAESSFTSIEEFLEPLELCYKSLCDCGDKAIADGSLLDLLRQVFTFGLSLVKLDIRQESERHTDVIDAITTHLGIGSYREWPEDKRQEWLLSELRGKRPLLPPDLPQTDEIADVIGAFHVLAELPPDSFGPYIISMATAPSDVLAVELLQRECGVRQPLPVVPLFERLADLQSAPASVERLFSVDWYMDRIKGKQQVMVGYSDSGKDAGRLSAAWQLYRAQEEMAQVAKRYGVKLTLFHGRGGTVGRGGGPTHLAILSQPPDTINGSIRVTVQGEVIEFCFGEEHLCFQTLQRFTAATLEHGMHPPVSPKPEWRKLMDEMAVVATEEYRSVVVKEARFVEYFRSATPETEYGRMNIGSRPAKRRPGGGITTLRAIPWIFSWTQTRFHLPVWLGVGAAFKFAIDKDVRNFQVLKEMYNEWPFFRVTLDLLEMVFAKGDPGIAGLYDELLVAEELKPFGKQLRDKYVETQQLLLQIAGHKDILEGDPFLKQGLVLRNPYITTLNVFQAYTLKRIRDPNFKVTPQPPLSKEFADENKPAGLVKLNPASEYPPGLEDTLILTMKGIAAGMQNTG

SEQ ID NO: 30188 - protein, 609 aa, Rhodopseudomonas palustris CGA009
MFESHFQSFEEPESGVALTARLSAFREELLRRKLTGFAIPRADQQQNEYVPPSDERLAWLTGFTGSAGLAYVLIDQAALFVDGRYTLQAAKQVDGNAWRIESLVEPPPERWLETHLKAGDRLGFDPWLHTSSAVERMQAACAKAGAELVAVDGNPVDAVWSERPAPPLGPVTVHGVEFAGESEASKLGRINEELARLKADALVLSDSHAVAWTFNIRGADVSHTPLPLSYALLPKDGRPTIFIDGRKLSNSVRDHLEQTADVAEPAELAPMLRELAKTGATIALDSATAADALTRLIKDAGGKPLRGADPVALLKAVKNTAEIDGTRAAHCRDAVALARFLAFIDAEAPKGALTEIDAVEALETFRRDTGALKDVSFPTISGTGPNGAIVHYRVTRKSNRRIQPGDLLLIDSGAQYQDGTTDVTRTIAVGEPTAEMRNRFTRVLRGHLAIARAVFPDGTTGAQLDTLARQFLWQAGIDFEHGTGHGVGSYLSVHEGPARISKLGTTPLKRGMILSNEPGYYKTDSFGIRIENLELVVEKQIDGAEKPMNGFETLTLAPIDRRLIDVAMLSAEERSWLDAYHARVRETVRPHLDGPTQLWLDAATAPLES

SEQ ID NO: 30189 - protein, 142 aa, Arabidopsis thaliana
  misc_feature (89)..(89): Xaa can be any naturally occurring amino acid
  misc_feature (97)..(97): Xaa can be any naturally occurring amino acid
  misc_feature (101)..(102): Xaa can be any naturally occurring amino acid
  misc_feature (107)..(107): Xaa can be any naturally occurring amino acid
  misc_feature (111)..(111): Xaa can be any naturally occurring amino acid
  misc_feature (115)..(115): Xaa can be any naturally occurring amino acid
  misc_feature (117)..(117): Xaa can be any naturally occurring amino acid
  misc_feature (123)..(123): Xaa can be any naturally occurring amino acid
  misc_feature (125)..(126): Xaa can be any naturally occurring amino acid
  misc_feature (133)..(135): Xaa can be any naturally occurring amino acid
  misc_feature (137)..(137): Xaa can be any naturally occurring amino acid
  misc_feature (139)..(140): Xaa can be any naturally occurring amino acid
MASSMLSSTAVVTSPAQATMVAPFTGLKSSASFPVTRKANNDITSITSNGGRVSCMKVWPPIGKKKFETLSYLPDLSDVELAKEVDYLXRNKWIPCXFDSXXEHGIXCNRXHGNXPXYYDGRXWXXLEVSIFXXXTXSXXSF

SEQ ID NO: 30190 - protein, 211 aa, Nicotiana tabacum
KLGCRSTDPREFKGYVFKIMGGCDKQGFPMKQGVLTPGRVRLLLYRGTPCFRGYGRRNGERRRKSVRGCIVSPDLSVLNLVIVKKGENDLPGLTDTEKPRMRGPREPQRSEALYFKEDDVRKYVNTTAEFTTKWKGSKAPKIQRLVTPLTLQRKRARIADKKKRIAKAKSEAAEYQKLLASRLKEQREKRSESLAKKRSRLSAASKPSIAA

SEQ ID NO: 30191 - protein, 1049 aa, Bacillus megaterium [sequence omitted]

SEQ ID NO: 30192 - protein, 298 aa, Ehrlichia canis str. Jake
MNIRIGTRGSVLALAQTLEVTNLLNRYFPEINIQVVKIKTSGDINNKVPINTIGGKGLFIKEIEEALLIGKVDLAVHSVKDIPAFYCDGLIIPCVLKRSSPYDVFVSSKYQSIKSLPINATVGTSSIRRKVQLNYLRPDLQVIPVRGNIDTRILKSDIGEFDGIVLAEAGLIRINKCNVIKEVLDSKIMLSAVGQGAICVQCRADDYNIINKIKVLNCHKSYVCVIAERSFLKTINGSCDTPLAALAQYVDSDTIYMSCMLSNEKEMVFSDCYFKECNAEESGIDMGKKLINELYGSC

SEQ ID NO: 30193 - protein, 404 aa, Arabidopsis thaliana
MAAALQTNIRTVKVPATFRAVSKQSLAPFRVRCAVASPGKKRYTITLLPGDGIGPEVVSIAKNVLQQAGSLEGVEFNFREMPIGGAALDLVGVPLPEETISAAKESDAVLLGAIGGYKWDNNEKHLRPEKGLLQIRAALKVFANLRPATVLPQLVDASTLKREVAEGVDLMVVRELTGGIYFGEPRGIKTNENGEEVGFNTEVYAHEIDRIARVAFETARKRRGKLCSVDKANVLEASILWRKRVTALASEYPDVELSHMYVDNAAMQLVRDPKQFDTIVTNNIFGDILSDEASMITGSIGMLPSASLSDSGPGLFEPIHGSAPDIAGQDKANPLATILSAAMLLKYGLGEEKAAKRIEDAVLVALNNGFRTGDIYSAGTKLVGCKEMGEEVLKSVDSQVPASV

SEQ ID NO: 30194 - protein, 337 aa, Debaryomyces hansenii CBS767
MVVYFDPNTAPFLNPAVDRRVAFITGGNSGIGWFTILHLYLHGYTVYVAGRTESKVRKAIEDIKIEAEKRVKEYTKEEQDARSLGSLDYVYLDLLDLSTVVAAAESFSKKEPELHILINNAGIMGVPYEETKDGYEIQYQVNFASHFLLTFKLLPLIKKVALKGSIQPRIIQLTSGGHRASYRYFQPSENMNKFPNILYTWYRYGAAKLASIQFMNLLGKANPDILCVSVHPGIIFGTELFKYWKKMPIFGYLSSASMYAVAPLIGVQIEEGSLSTLKTALDPKINLLQDNGKYYVTGGSEGSTSRVAQNEKDAITTWNWNLDYMRKHNFNIDAPKL

SEQ ID NO: 30195 - protein, 374 aa, Silicibacter sp. TM1040
MSYETPGPVESELRDAISPIEEIIDAARAGKMYILVDHEDRENEGDLIIPAEFADADAINFMATYGRGLICLPMTAERIDRLGLPMMAVNNSSRHETAFTVSIEAREGVDTGISAADRALTVATAINEQNTMAAIATPGHVFPLRAKRGGVLVRAGHTEASVDISRIAGCHPSAVICEIMKDDGTMARLPDLVEFAKTHDMKIGTISDLIAYRAKNDNLVDETARSTVTSEYGGDWEMRIFTDQTHDVEHVVLIKGDITTPEPVLTRTHALHEASDLLGLGPKPAGELPRAMELIADEGRGIVCLFRQPRNALYASDEEGVRTIKQTGLGAQILNKLGVEELILLTDSPQTKYVGLDAYGLSIVGTRPILSRDS

SEQ ID NO: 30196 - protein, 348 aa, Glycine max
MGSASESVCVTGASGFIGSWLVMRLIERGYTVRATVRDPVNMKKVKHLVELPGAKSKLSLWKADLAEEGSFDEAIKGCTGVFHVATPMDFESKDPENEVIKPTINGVLDIMKACLKAKTVRRLIFTSSAGTLNVIERQKPVFDDTCWSDVEFCRRVKMTGWMYFVSKTLAEKEAWKFAKEQGLDFITIIPPLVVGPFLMPTMPPSLITALSPITGNEDHYSIIKQGQFVHLDDLCLAHIFLFEEPEVEGRYICSACDATIHDIAKLINQKYPEYKVPTKFKNIPDQLELVRFSSKKITDLGFKFKYSLEDMYTGAIDTCRDKGLLPKPAEKGLFTKPAETPVNAIMHK

SEQ ID NO: 30197 - protein, 508 aa, Pseudomonas fluorescens PfO-1
MNASLTPNETTIQKVKLLIDGEWVESQTTEWHDIVNPATQQVLAKVPFATAAEVDAAVSAAQRAFQTWKLTPIGARMRIMLKLQALIREHSKRIAVVLSAEQGKTIADAEGDIFRGLEVVEHACSIGSLQMGEFAENVAGGVDTYTLRQPIGVCAGITPFNFPAMIPLWMFPMAIACGNTFVLKPSEQDPLSTMLLVELAIEAGIPAGVLNVVHGGKDVVDGLCTHKDIKAVSFVGSTAVGTHVYDLAGKHGKRVQSMMGAKNHAVVLPDANREQALNALVGAGFGAAGQRCMATSVVVLVGAAKQWLPDLKALAQKLKVNAGNEPGTDVGPVISKKAKARILDLIESGIKEGAKLELDGRDISVPGYEKGNFVGPTLFSGVTTDMQIYTQEIFGPVLVVLEVDTLDQAIALVNANPFGNGTGLFTQSGAAARKFQTEIDVGQVGINIPIPVPVPFFSFTGSRGSKLGDLGPYGKQVVQFYTQTKTVTARWFDDDSVNDGVNTTINLR

SEQ ID NO: 30198 - protein, 412 aa, Caulobacter crescentus CB15
MSAEVNQNACVVIVGAGHAGGSVAAFLRQYGHEGRIVLIGDEPLLPYQRPPLSKAWLKGEADADSLSLKPAGWYADNNVMLRLGGVAERINRSDKTVALASGEVIPYDFLVLATGARARELPIPGADLAGVLALRTAADAELLKNALGPDKRLAVVGGGYVGLEAAASARALGSHAMVIERESRVLARVACETLSHFFQDYHGKHGVAFELNAGVAAFEGHDGHVTGVRFNDGRVVACDVALVGVGAVPNDELAKDAGLSTANGVVVDLEARTDDPSIFAIGDVTHRPLPLYDRQFRLESVPNALEQAKQAASAILGRPGPAPETPWFWSDQYDLKLQIAGLPFDADRQVVRGDVAAAKFAVFHLKGDLVQAVEAVNAPPEFMAGKQLIAKRTPVDANKLADPSVSMKEVAA

SEQ ID NO: 30199 - protein, 324 aa, Haemophilus ducreyi
MAKEIKKIAVLTSGGDAPGMNAAIRGVVRAALNEGLEIFGVQDGYYGLYHDKVIPLDRRSVSEIINRGGTFLGSARFPQFKDIEVRKQAVKILAKYEIDALVVIGGDGSYMGAKLLTEEFGYPCIGLPGTIDNDIVGTDYTIGYQTALQTAVEAIDRLRDTSTSHQRISIVEIMGRHCGDLTISAALAGGCEYIIVPEKGLDKESLIHSIADNFRKGKRHAIIAITELMTDVHQLARELEEKFGHETRATVLGHIQRGGSPCPFDRILASRMGVYAVDLLRQGFGGRCVGIQNEHLVHHDIIDAINNMRRPFKQDIFEAASKLA

SEQ ID NO: 30200 - protein, 434 aa, Pseudomonas fluorescens Pf-5
MGTHVIKMPDIGEGIAEVELAQWHVKVGDQVVEDQVLADVMTDKAMVDIPSPVHGKVISLGGEPGEVMAVGSILISIEVEGAGNLKESAQAAAPAAKEPAAINKPVAAAPVAQAPKAEKTVASPAAACRAAPQAPVAREADERPLASPAVRKHALDLGIQLRLVQGSGPAGRILHEDLDAYLAQDSQPLKGYSAPGAGYAERHDEEQIQVIGMRRKIAQRMQESKHRAAHFSYVEEVDVTALEELRIHLNEKHGATRGKLTLLPFLVRAMVVALRDFPQINARYDDEAQVITRHGAVHVGVATQSDVGLMVPVVRHAEARSLWGNAEEIARLAQAARSGKAARDELSGSTITLTSLGALGGIVSTPVLNLPEVAIVGVNRIVERPMVIKGQIVIRKMMNLSSSFDHRVVDGMDAAQFIQAIRGLLEQPATLFVE

SEQ ID NO: 30201 - protein, 191 aa, Glycine max
MASKLLLQRRLFRFLQLSPPFFSSIHAAPTILSAKASEFMFLYNVNALLPPLSPSRNFCSRSFNLHESQGPLTIDYSSLLQEGEFHRLADSTIHSLQEKLEDYGDSVEVDGFDIDYGNDVLTIKLGDLGTYVLNKQTPNRQLWLSSPMSGPSRFDWDRDTKAWIYRRNKANLYKILEGELEQLCGKPIVLS

SEQ ID NO: 30202 - protein, 586 aa, Brassica oleracea
MCGILAVLGCSDDSQAKRVRVLELSRRLRHRGPDWSGIYQNGFNYLAHQRLAIIDPDSGDQPLFNEDKSIVVTVNGEIYNHEELRKGLKNHKFHTGSDCDVIAHLYEEHGENFVDMLDGIFSFVLLDTRDNSFMVARDAVGVTSLYIGWGLDGSLWVSSEMKGLHEDCEHFEAFPPGHLYSSKSGGGFKQWYNPPWFNESVPSTPYEPLAIRSAFEDAVIKRLMTDVPFGVLLSGGLDSSLVASITARHLAGTKAAKRWGPQLHSFCVGLEGSPDLKAGKEVAEYLGTVHHEFHFTVQDGIDAIEDVIYHVETYDVTTIRASTPMFLMSRKIKSLGVKMVLSGEGSDEIFGGYLYFHKAPNKQEFHQETCRKIKALHKYDCLRANKATSAFGLEARVPFLDKEFINTAMSLDPESKMIKPEEGRIEKWVLRRAFDDEERPYLPKHILYRQKEQFSDGVGYSWIDGLKAHAAENVNDKMMSKAAFIFPHNTPLTKEAYYYRMIFERFFPQNSARLTVPGGATVACSTAKAVEWDASWSNNMDPSGRAAIGVHLSAYDGSKVALPLPAPHKAIDDIPMMMGQEVVIQT

SEQ ID NO: 30203 - protein, 539 aa, Arabidopsis thaliana
MAYASRIINHSKKLKDVSTLLRRENAATIRYYSNTNRAPLNREDTFNSRLGYPPLERISICSTSTLPVSIIFSTTRSNLSSAMGRPIFGKEFSCLMQSARGFSSGSDLPPHQEIGMPSLSPTMTEGNIARWLKKEGDKVAPGEVLCEVETDKATVEMECMEEGYLAKIVKAEGSKEIQVGEVIAITVEDEEDIGKFKDYTPSSTADAAPTKAEPTPAPPKEEKVKQPSSPPEPKASKPSTPPTGDRVFASPLARKLAEDNNVPLSDIEGTGPEGRIVKADIDEYLASSGKGATAKPSKSTDSKAPALDYVDIPHSQIRKVTASRLAFSKQTIPHYYLTVDTCVDKLMALRSQLNSFKEASGGKRISVNDLVVKAAALALRKVPQCNSSWTDDYIRQFKNVNINVAVQTENGLYVPVVKDADRKGLSTIGEEVRLLAQKAKENSLKPEDYEGGTFTVSNLGGPFGIKQFCAVVNPPQAAILAVGSAEKRVVPGNGPDQFNFASYMPVTLSCDHRVVDGAIGAEWLKAFKGYIENPKSMLL

SEQ ID NO: 30204 - protein, 186 aa, Triticum aestivum
ILPSSAQAPASHPMAKKRKRSSDAPASAAVEKPDDSAPERPERTLFGFKDSAAEPASKDAGPLFRNKEKVLITCSRRIIYRYRHLMQNVVSLLPHAKKDSKVESKQSKGSALNELVELRSCSSCLFFECRKQKDLYLWMVKSPAGPSVKFLVNAVHTMEELRLTGNHLKGSRPLLTFSSNFDQQPH

SEQ ID NO: 30205 - protein, 320 aa, Exiguobacterium sibiricum 255-15
MTETEQKIYDVIIIGAGPAGMTAALYASRANLSTLMIERGIPGGQMANTEDIENYPGYDSILGPDLSQKMFDHSKAFGAEYAYGDVRSIEDGPAFKTVHAHNKDYHARAIIIASGAQYKKIGVPGEEELGGRGVSYCAVCDGAFFKEKELFVIGGGDSAVEEGVYLTRFAKKVTIVHRREELRAQKILQKRAFDNPKIDFIWNHTVKQINEDNGKVGGIELINTKTAETTTYPIDGVFIYIGMNPITGYVQDLGILNDQGYVVTNEAMETNIKGIFAAGDVREKTLRQVVTATNDGSIAAQNAQHYIEALLEELQESSQV

SEQ ID NO: 30206 - protein, 480 aa, Prochlorococcus marinus subsp. pastoris str. CCMP1986
MVSENLVKDVVSEPYKYGFVTDIETEKISKGLNEDTIRLISEKKEEPKYLLNFRLNAFRKWQRMEEPNWADLGYKKIDYQDIIYYSAPKQKEKISSLDEVDPKLLETFDKLGIPLTEQKKLTNVAVDAVFDSVSIATTFRKELAEHGVIFCSISEAVKDHSNLIEKYLGSVVPANDNYFAALNSAVFSDGSFVYIPKGVKCPMDLSSYFRINSGDSGQFERTLIIAEESSSVSYLEGCTAPMFDTNTLHAAVVELIALDDASIKYSTVQNWYAGNEEGVGGIFNFVTKRGKCLGKRSKISWSQVETGSAITWKYPSCILLGEESVGEFYSVALTNNLQQADTGTKMIHIGPRTKSTIVSKGISAGNSINSYRGLVKMGSKASGSRNYSQCDSMLIGDQAAANTFPYIHSQQPNSEIEHEASTCRISEDQLFYLQSRGIEFEEAVSMMVSGFCRDVFNQLPLEFAAEADKLLALKLEGSVG

SEQ ID NO: 30207 - protein, 341 aa, Frankia sp. CcI3
MRIGVLTGGGDCPGLNAVIRAVVRKGESVYGHSFVGYRDGWRGPLTGETVPLDIAAVRGILPRGGTILGSSRTNPYAAVDGPALVREHLAAAEVDALIAIGGEDTLGVAAQLHAEGLPVVGVPKTIDNDLSATDYTFGFDTAVNIATEAIDRLHTTAESHHRVLIVEVMGRHAGWIALHSGMAGGANVILIPERPFDFDKVCAFVEARFATHYAPIIVAAEGAVPITGTLVAREGEVDAFGHVRLQGIGAVLETEIRARTGRDARATVLGHLQRGGTPTAFDRWLATRFGLHAVDAVHEGDFGVMVALHGTRIDRVPLQDATRELKTVPEELYHEAEIFFG

SEQ ID NO: 30208 - protein, 413 aa, Exiguobacterium sibiricum 255-15
MVERLVLENGVRIVSERIENARSVATGIFIKAGSRTETKEEHGISHLIEHMMFKGTKKQSAKEIAVYFDRLGGNINAFTSKDQTCYYVKTLDEHAITAFDVLADMFLESTFDEEELEKEKRVVIEEIKMYEDTPDDLVHELLAVAAYGEDVMARPILGTEESVKQLSRQMIVEYLQEAYAPEQIVISVAGHVTDELITQIKNRFGSLQSSGKIRQITEPVLKSDALRKEKDTEQVHVCYNFRAIPSADDRLPTLALLNNAFGATMSSRLFQSIREDRGLAYSVFSYYTTFDDHGTFTIYVGTSKETLEEVETVLSAEIKQLLEHGLTTKELEDGIEQLKGSLILGNESISSHMNRNARNELHLGMHPTLEDVLTEVEQITPADVQEMIAYIFSEPPAKAYILPEIDEADLETE

SEQ ID NO: 30209 - protein, 545 aa, Prochlorococcus marinus subsp. pastoris str. CCMP1986
MTEVNVINIKNPFLDQKPGTSGLRKSTLKFKEEHYLEIFIEAIFKSLNNLSGSTLVVGGDGRYGNIEAIEKIIQICVAHKVGKVIIPKNGLLSTPATSHLIRKEEAIGGIILSASHNPGGIDGDFGVKLNTANGGPAPESITDQIFQCSQSLKSYKISNIKIPDLDKFGVFSLGETSLEIIDGLKDYSDLMENIFDFDQISDFLKNDFSLIFDAMNAVTGPYAKNIFVEKMGLVDACVMNGTPLEDFGGLHPDPNLTYASKLADLLLVQKAYSFGAACDGDGDRNMILGQGCFVNPSDSLAVITANTNCVPGYKDGIAGVARSMPTSSAVDFVARALNIPCFETPTGWKFFGNLLDSNLITICGEESFGTGSNHVREKDGLWAVLYWLQILAVKNCSVSELIQNHWKQYGRNYYSRHDYEAIPSTIANQIFNNLSSMLPSLKDNKFAGNLVKQADNFSYLDPVDNSVSKNQGLRIILEDNSRVIIRLSGTGTKGSTLRLYFEKFANSQHNLDLNPQIALKDLINDLDHLLNISKLTKMEKPTVIT

SEQ ID NO: 30210 - protein, 187 aa, Brassica napus
  misc_feature (47)..(47): Xaa can be any naturally occurring amino acid
MRPLDENETTVVFEKIFKFVGNNLKNIVENPSHEGPESDPGRYCFRXGGNRVYYASESLVKRATNISRKSLGSLGTCIGKYTHAGSFHLTIMSLNLLAANAKHKVWLKPTSEMSFLYGNHVLKGGLGRITDSIVPGDGVVVFSMSDVPLGFGIAAKSTQDCRKLDPNGIVVLHQADIGEYLRDEDEL

SEQ ID NO: 30211 - protein, 1053 aa, Synechococcus elongatus PCC 6301
MLAVSLRDHGFPSATVQIRPAFCVQSDVVGSGNPPRMNYCQNARTAMSAALQSSDDAFRTVSSPLATDLDLSSPLEFFLRHRLTVVEELWEVVLRQECGQELVDILTQLRDLTSPEGQAPEVGGEALVQVIETLELSDAIRAARAFALYFQLINIVEQHYEQTQYQLAYERSRLEPLPGPDESPEGLHTIEIPQHQLDPFAAVIPLNQDPATFQTLFPRLRQLNVPPQMIQELTDRLDIRLVFTAHPTEIVRHTIRDKQRRIAYLLRQLDELETGKNRGFRELEAQNIRQQLTEEIRLWWRTDELHQFKPTVLDEVDYALHYFQEVLFEAIPLLYQRFRLALQGTFPDLQPPRYNFCQFGSWVGSDRDGNPSVTSAVTWQTACYQRSLVLDRYITAVEHLRNVLSLSMHWSEVLPELLSSLEQESMLFPETYEQLAVRYRQEPYRLKLSYILERLHNTRDRNTRLQQQQEKDPTTPLPEYRDGTLYQAGTAFLEDLKLIQHNLKQTGLSCYELEKLICQVEIFGFNLVHLDIRQESSRHSDAINEICEYLQILPQPYNELSEAERTAWLVQELKTRRPLVPARMPFSESTREIIETLRMVKQLQEEFGEAACQTYIISMSRELSDLLEVLLLAKEVGLYDPVTGKSSLQVIPLFETVEDLQNAPRVMTALFELPFYTQLNPTQSEPLQEVMLGYSDSNKDSGFLSSNWEIHKAQKALGTVARDHRVKLRIFHGRGGSVGRGGGPAYEAILAQPGRTTDGRIKITEQGEVLASKYALPELALYNLETITTAVIQSSLLGSGFDDIEPWNQIMEELAARSRRHYRALVYEQPDLVDFFNQVTPIEEISKLQISSRPARRKTGKRDLGSLRAIPWVFSWTQSRFLLPSWYGVGTALQEFLQERPEQNLNLLRYFYEKWPFFRMVISKVEMTLAKVDLQIAHHYVHELANPEDQERFERVFSQIAAEFQLTCHLVLTITNHGRLLDGDPELQRSVQLRNGTIVPLGFLQVALLKRLRQYRQQTETTGLMRSRYSKGELLRGALLTINGIAAGMRNTG

SEQ ID NO: 30212 - protein, 353 aa, Neurospora crassa
MADNQIPSSVADAVLVKSIEMPEGSQKVEELDFNKFKGRPITVDDLLQGMKHMGFQASSMCEAVRIINEMRAYRDPTTSEKTTIFLGYTSNLISSGLRGTLRYLVQHKHVSAIVTTAGGIEEDFIKCLGDTYMSSFSAVGADLRSKGLNRIGNLVVPNSNYCAFEDWVVPILDKMLEEQEASRGTENEINWTPSKVIHRLGKEINDERSVYYWAWKNDIPVFCPALTDGSLGDMLYFHTFKASPEQLRIDIVEDIRKINTIAVRAKRAGMIILGGGIVKHHIANACLMRNGAESAVYINTAQEFDGSDAGSRPDEAVSWGKIKVGADAVKVYMEATAAFPFIVANTFAKEDGL

SEQ ID NO: 30213 - protein, 592 aa, Rhodopseudomonas palustris CGA009
MTINLNVPDIRELRPRITVFGVGGAGGNAVNNMITAGLDGVDFVVANTDAQALTMSKAQRLIQMGTQVTQGLGAGSQPDVGSAAAQEVIDEIRDHLSGANMVFVTAGMGGGTGTGAAPVIAKAAREMGILTVGVVTKPFHFEGARRMRTAETGITELHKVVDTLLIIPNQNLFRVANEKTTFADAFAMADQVLYSGVACITDLMVKEGLINLDFADVRAVMREMGKAMMGTGEATGEKRALTAAEAAIANPLIDDSSMKGARGLLISITGGKDLTLFEVDEAATRIREEVDQDANIIVGATFDESLDGIIRVSVVATGIEQAQLSRNAGTPAAAAAVSAVGNDSRLAELTAKLRADNQRIAEAAAMRAAQAAAAPVSAVTESSPRQAANVERAALAAIAAAVGNEPMPQEAPVQSASYGDVTVRPIPQKPSLFPDPEQSRAVSEEPLAPEAFVPPAADRAAMRPPRMPRFDELPVPAQNEIRQARGDGEEDHPQKNRLSLLQRLANGLGRRDDEPAEAPQVARNGGPQMPPLPDRRPQRSVSEQMGKEPVSEYAKRPAPQGLDMHGRPAPVAPAPQGDDHLDIPAFLRRQAT

SEQ ID NO: 30214 - protein, 107 aa, Ehrlichia ruminantium str. Gardel
MIEQIEDSDFQSKVISCKEDILILVDFWAPWCGPCKSLEPQLEKLANQYADKIKIYKLSIDNNQDVAIQYGVSAVPTILMFKNGKKLAQVIGADISRIILELNNYIS

SEQ ID NO: 30215 - protein, 609 aa, Arabidopsis thaliana
MPTWWGRKSCKNKDDNHRGIISTDRDIKSSAVVVDPPLTPTRGGTPRCSREFAGASSAFSGFDSDSTEKKGHPLPRPLLSPVSIHHQDHVSGSTSGSTSVSSVSSSGSADDQSQLVASRGRGDVKFNVAAAPRSPERVSPKAATITTRPTSPRHQRLSGVVSLESSTGRNDDGRSSSECHPLPRPPTSPTSPSAVHGSRIGGGYETSPSGFSTWKKGKFLGSGTFGQVYLGFNSEKGKMCAIKEVKVISDDQTSKECLKQLNQEINLLNQLCHPNIVQYYGSELSEETLSVYLEYVSGGSIHKLLKDYGSFTEPVIQNYTRQILAGLAYLHGRNTVHRDIKGANILVDPNGEIKLADFGMAKHVTAFSTMLSFKGSPYWMAPEVVMSQNGYTHAVDIWSLGCTILEMATSKPPWSQFEGVAAIFKIGNSKDTPEIPDHLSNDAKNFIRLCLQRNPTVRPTASQLLEHPFLRNTTRVASTSLPKDFPPRSYDGNFSLQPTREPYPGRLSHDNYAKQPLSRTIKSPSRENVRAITSLPVSPCSSPLRQLGPAYKSCFLSPPHPSYAFPGQDSGYNLAEFAASPFRMKKDAMMEPSSFRTQTPNSPLRSRLV

SEQ ID NO: 30216 - protein, 360 aa, Methylococcus capsulatus str. Bath
MTIKIAVLPGDGIGPEIVAEALKVLDCLRSDFGLAVETEHALIGGAAYDAHGTPFPKETLELCRAADSILLGAVGGPKWEPLDYSLRPERGLLGLRSELELFSNLRPAVLYPQLVSASTLKPEVVAGLDIMIVRELTGGIYFGKPRGRRINEDGEREGYNTLVYSESEIRRIAHSAFQIARKRNRRLCSIDKANVLECTELWREVVIEVGKDYPDVALSHMYVDNAAMQLVRNPKQFDVMLTDNMFGDILSDCAAMLTGSIGMLPSASLAESGKGMYEPIHGSAPDIAGRGIANPIATILSLAMMLRYSFDDAVSAERIGKAVQTALDQGFRTADIASEGTVEVGTAAMGDAIVAALRAV

SEQ ID NO: 30217 - protein, 270 aa, Candida albicans SC5314
MSDTIILPGDKLPIDEDIFTVKTTIGPGIYKKPKTQELIPSAAGILHYERAKSSSQQLIYIESNSKRYIPHTNDYVIGIITGAIGESYKVSLQSNSTPVLLSFWAFPNASKKNRPNLKNGQAVYARVSQDIPEIETELECIDPTSGKEGGFGVLDESGYIFDVHLNFARELLFNPKTIFLETLATRCQFEIAIGINGKIWIKCGNGVKKEANDGSNNNQDQGEDQEMIDVSEENLKDLKSTLAAATFLTLCQFVTQDKLKQELNNAFQGI

SEQ ID NO: 30218 - protein, 544 aa, Oryza sativa
MSDSELSQSTVVFGLRMWVLVGVAVGAAFVLFLVLLSVLCLLASRRRRRRRGPNTSPVQQLPVSAPPKNPQKVKAPKDIQEVPAQATAAAAAKTPLAQVLQMPAPPPPPPPMAAAAPPPETVQIATGKEHRITYPEPPHRSGSSSHGSGEAPSVPEVSHLGWGHWYTLKELEAATEMFADENVIGEGGYGIVYHGVLENGTQVAVKNLLNNRYPTTNSSQLRCTEITTATQLDCLRVIATGIDHPRTVDRGQAEKEFKVEVEAIGRVRHKNLVRLLGYCAEGNQRMLVYEYVDNGNLEQWLHGEVGPVSPLSWDSRVKIILGTAKGLMYLHEGLEPKVVHRDVKSSNILLDKHWNAKLSDFGLAKLLGSERSYVTTRVMGTFGYVAPEYAGTGMLNETSDVYSFGILIMEIISGRVPVDYNRPPGEVNLVDWLKTMVSTRNSEGVVDPKMPQKPTSRALKKALLVALRCVDPDARKRPKIGHVIHMLEVDDFPYRDERRGARAPVQARVADKPVAIEAGDRESDSSGNNSARQTEPFRWRNPES

SEQ ID NO: 30219 - protein, 549 aa, Colwellia psychrerythraea 34H
MSIEKVLVPDVGGDEVEIIEICFAVGDTLEADEGIVTVETDKASMDIPAPFAGELVSLTVKVGDKIKEGDIIAEMKATGAVSAPAEEAPVAAVVETPVAPVAAVVEAAPVAAAVATASQVIEIAVPDIGEDGEVDVIEVLVSVGDVIEEEDGLITLETDKATMDVPSTHAGTVKEVFISNGDKVKQGSLVIKLETAGGVAPVAAAPAVQAAPVAAAPIAAPAVVKSAPVPHHPQAGNVKKGTIYTSPSIRRLAREFGVDLTLVKGTGRKGRILKEDVQSYVKYELSRPKANAGSSVAAGEGGLQVVSAKAIDFSKFGEIETKALTRIQKISGPFLHRNWVTIPHVTQFDEADITNVEAFRKEQNVVCEKQKLGFKITPLVFILKAAADALRAFPTFNSSLSEDGESLILKKYIHIGVAVDTPNGLVVPVVRDVDQKGIHQLSRELLEISMKARDGKLKATDMQGGCFTISSLGGIGGTAFTPIVNAPEVAILGVSKSEIKPKWNGKDFEPKLMLPLSMSYDHRVIDGALAARFTVHLAGVMSDIRKLVL

SEQ ID NO: 30220 - protein, 727 aa, Desulfotalea psychrophila LSv54
MPLSSMLGPDGIKVLVANYQPDADMQRIDDAWQFAARVHEGQEHFSGTPYLLHLQEVGATLASMQLDLDTILAALLHGTIKHGVEITELRDAFGDDVASIVEGASRITKVQYNNKLVGQAEGVRKMLLAIAADIRVLLVRLVDRLTDLFNLEKLPRERQLEIAWETMNLYAPLASRLGIDWLKRELEDNSFRFLYPDEYAELSRDMESSLEERESYVAEMLATLKGKLEENDIHPLRVLGRPKHLYSIYKKLVAQNIKLDKVYDKVAFRIIVDSVKECYETLGVIHGEWAPVPGRIKDFISVPKANNYQSMHTTVAGPCGHFIEIQIRTEEMDRVASEGVAAHWAYKEGQKTAGRDAKLFGDLKNLVKSLKDVEDPREFLDSVQGELYDPDVYVLTPGGEVKEFRYGSCPIDFAYAVHSEVGDHCTGAKVNGRLVPLKYHMQNGDIIEILTSPSQHPRRGWLDFVQSGRAKARIRSWFRREENERALKLGREICEREIRLHNTSLKKLVKSGQIRLLFKELRCNSLDDMLIKVGNGGITIENLVKALQPHNPQLDRDVPAQDAVTDEALPILPKQATTQIEQSKDGLRIAGVEGMLVRVGQCCRPVPGDKVIGFITHGRGVTVHKADCSNLGSTDPHRRIDVDWAQSSSSSYRAVLHVVTENSKGIFSEVSAIIAGESANMVEMSARVTVEDTAEFTLSLEVKDLEQLQHLMQILRQMPVVISVRRL

SEQ ID NO: 30221 - protein, 315 aa, Betula pendula
MENFPVINMEKLNGDERGATMAKINDACENWGFFELVNHSIPHEFLDNLERLAKEHYKKCLEQRFKEMVASKALEGAKAEVNDMDWESTFHVRHLPQSNISEIPDLEDEYRNVLKEFALKLEKLAEELLDLLCENLGLEKGYLKNAFYGSNGPTFGTKVSNYPPCPKPDLIKGLRAHTDAGGIILLFQDDKVSGLQLLKDGQWIDVPPMRHSIVINLGDQLEVITNGKYKSILHRVIAQTDGNRMSIASFYNPGSDAVIYPAPSMVEKETEEKNVYPKFVFEDYMKLYAGLKFQAKEPRFEAMKANGKLGPIATA

SEQ ID NO: 30222 - protein, 638 aa, Bifidobacterium longum NCC2705
MGQGQSSVFDLAAVAAASNGGNNDPLLPPARFIGDPQKPSRMPYNKYAAYDKQIPFDYPERTWPGKRLQRAPRWCSVDLRDGNQALVNPMDSERKLRFWNLLVSMGFKEIEVGFPSASETDFDFIRMLIERELIPDDVTIVVLTQCREHLIRRTYEALKGAKRAIVHFYNSVSVLQREVVFRKNKEEIKKLATDAAELCKDLENEAKGIDLYYEYSPESFTGTEPEYAVEVCNAVIGVIKPTPEHPMIINLPATVEMTTPNVFADEVEYVSTHLDDRDSVVLSLHPHNDEGMGVAATELAVLAGADRVEGCLLGNGERTGNVDLVTLGLNWLTQGIDPQLDLSNVPEIRKTVEYCNQIKISERHPYAGNFVFTAFSGSHQDAIKKGLEARQVAAERAGADLDSFVWLVPYLPIDPKDIGRTYEAIIRVNSQSGKGGMAYLLKTNHNLDLPKRLQIEFDKIVQNYADTTKKEVKDEDIWRLFKDEYLPVEQSGMTAAGVVVGDTHDASLVPWGRLKLLKVAVSSGEDGSDTVLKARLLDRGVNVGVDAPVEREVSGIGNGPIAAFLNAISNFGVDASIMDYVEHTMSVGTDAMAASYVECQVGEADDAQIVWGVGIDSSITTSALKSIISAINRFQRKR

SEQ ID NO: 30223 - protein, 135 aa, Podospora anserina
MTGGGKSGGKASSGKNAQSRSSKAGLAFPVGRVHRLLRKGNYAQRVGAGAPVYLAAVLEYLAAEILELAGNAARDNKKTRIIPRHLQLAIRNDEELNKLLGHVTIAQGGVLPNIHQNLLPKKTGTKPGKNASQEL

SEQ ID NO: 30224 - protein, 511 aa, Zea mays
MATAIYLSSPAAPSSCARQRRQTTRATASATDRPREVVSPKRRLPLRKVPGDYGPPVLGAIRDRFEYFYGPGGRDGFFTSRVRAHGSTVVRLNMPPGPFVARDPRVVALLDAASFPVLFDTSLVDKTDLFTGTFMPSTELTGGYRVLSYLDPAEPNHGPLKTLLFYLLSHRRQHVIPKFREVYGDLFGLMENELARVGKADFGHYNDAAAFSFLCQALLGRDPAESALQGDGPKLITKWVLFQLSPLLSLGLPKHVEDSLLHSFRLPPALVKKDYDRLADFFRDAARRVVDEGERLGVAREEAVHNILFAMCFNSFGGMKILFPSLVKWLGRAGGRAHGRLATEVRDAVRAHGGEVTMKALAEMPLVKSAVYEALRIEPPVAMQYGRAKQDMVVESHDYGFEVREGEMLFGYQPMATKDPRVFARAEEYVPDRFLGEDGAQLLRHVVWSNGPETASPTLQDKQCAGKDFVVLIARLLVAELFLRYDSFDVQVGASALGSSVTITSLKKATF

SEQ ID NO: 30225 - protein, 500 aa, Podospora anserina
MKSTRSGSNNWQSAVSGTSPKIATAMEAAISAGAEVSRVGRRILQRIWDPEPTNDRSNNEPVWCLGCSYLLDTKEYGTPPTLTTSTPPADATLTAIVPEPGAGVESEPRRATEKAGVPVNTSNAKAVAPIPVAASGQHQLQVPETPPLSVASSFDSALAYEEPGQDGGWPPAFLDDFESRIWMTYRTGFEVIPRSTDPKAAAALSFTMRFKTSFGDQTGFSSDTGWGCMIRSGQSLLANAMLISRAGRAWRRTTNPDIEREIVCLFADDPRAPYSIQNFVNHGAAACGKYPGEWFGPSATARCIHSLRVYLTRDLPEVYEDNFMSTANPDGNHFHPTLILVSTRLGIDKINPIYHEALISTLQLPQAIGIAGGRPSSSHYFIGAQGQWLFYLDPHHPRPALPYRENPNDYTIEELDSCHTRRLRHLHVEDMDPSMLIGFLIKDEDDWDLWKSSVKHVQGKAIINVSPHDPEHGMGFGRAGAIDEVETLSDEDDTDTVLDL

SEQ ID NO: 30226 - protein, 330 aa, Streptococcus pyogenes MGAS315
MKDKAYDITIIGGGPIGLFAAFYAGLRGVTVKIIESLSELGGQPAILYPEKMIYDIPAYPSLTGAELTENLIKQLSRFEDRTTICLKEEVLTFDKVKGGFSIRTNKAEHFSKAIIIACGNGAFAPRTLGLESEENFADHNLFYNVHQLDQFAGQKVVICGGGDSAVDWALALEDIAESVTVVHRRDAFRAHEHSVELLKASTVNLLTPYVPKALKGIGNLAEKLVIQKVKEDEVLELELDSLIVSFGFSTSNKNLKNWNLDYKRSSITVSPLFQTSQEGIFAIGDAAAYNGKVDLIATGFGEAPTAVNQAINYIYPDRDNRVVHSTSLID

SEQ ID NO: 30227 - protein, 414 aa, Legionella pneumophila str. Lens
MSVKNAIYAQSGGVTAVINASACGVIQTAKLFPEQIGKVYAAKNGIIGALNEELIDTSLESEEDIAKLMQTPSGAFGSCRYKLKDNGEEYQRLIAVFKAHNIGYFFYNGGGDSQDTAHKVSQLGKTMGYPITCIGIPKTVDNDLPFTDNCPGFGSVAKYIAISTKEAGFDVASMAASSTKVFILEVMGRHAGWIAAASGLAEQNPGEPPHIILLPEVPFEPTRFLKKVKDCVNSYGYCVIVVSEGIRNKEGKFLSEAGLRDAFGHAQLGGVAPVIAQLIKSELGFKYHWAVADYLQRAARHIASQVDLDQAYALGKAAVEYAVKGYNAIMPIVIREQDEPYQWSIGQVPLAEVANQEKSMPPEYIAEDGMGITDACKRYLSPLIQGEAYPNYKNGLPDYVRLKNQLVAKKINQD

SEQ ID NO: 30228 - protein, 635 aa, Oryza sativa (indica cultivar-group)
MDGSCDCIEPLWQADDLLVKYQYISDFFIALAYFSIPLELIYFVKKSAFFPYRWVLIQFGAFIVLCGATHLINLWTFAIYTKTIAVVLTVAKAATAVVSCITALMLVHIIPDLLNVKLRERFLKDKADELDREMGIIRTQEETGRHVHMLTHEIRSTLDRHTILRTTLVELGRTLALAECALWMPTRSGSALQLSHTIYNSAAIGSVVPINLPIVSKVFNSNRVVKIPHTSPLASITADKSRYVPPEVVAIRVPLLHLTNFQINDWPELSAKSFAVMVLMLPPDSAREWRPHERELVEVVADQVAVALSHAAILEESMRARDLLMEQNIALDAARREAEMAICACNDFLAVMNHEMRTPMRAIVSLSSLLLETNLSAEQRLMVETILKSSDLLATLTNDVLDVSKLENGSLELEIAPFNLHSTFTDVVNLIKPVAACKRLSVMVTLAPELPLHAIGDQKRLMQIILNVAGNSIKFTKEGHVSITASMARPHALRGPHEPDYHPVVSDGFLYLAVQVKDTGCGISPQDMPHTFRKFAHPENAGKWNSGSGLGLALSRRFVSLMEGNIWLESEGVGKGCTAMFFVKLGMPEKPNANLRRMAPHPLQPNQGAGGPDALSISIMDSNPRVPRVRYQSSV

SEQ ID NO: 30229 - protein, 404 aa, Corynebacterium efficiens YS-314
MIGVSRPTPQNSYPGGSTVIVSTKPLTDRSRLSEAHAEMIKATLPLVGSKINDITPVFYNRMFTAHPELLRSTFNRANQKQGDQQKALAASIATFATMLVDPEAPDPVDMLARIGHKHVSLGITADQYNIVHEHLFGAIVEVLGADVVTPPVAEAWDAVYWLMANVLIDLESDLYASNDLAPGDVFRHVTVTGKKQLSDKVWEYTFEGDLVTPAPGQYTSIGVKLPDGARQLRQYSLLSGTDSQYRIAVEDNGEVSTFLRDNVEVGDTIEASVAAGDLVMNDDVNPVVLISQGIGSTPMVGMLNQVAADRHVTVLHADQSEKDHAQREEMVALVGGLANGALYTFYRDADQWLNVAGHIPSDASVYLCGGNEFLQNVRGQLENLEEQPREIRFELFSPNDWLIS

SEQ ID NO: 30230 - protein, 326 aa, Rubrobacter xylanophilus DSM 9941
MRGRPLHRGAGLRQQGGGQQPEPAGRDEPQKAGGPEDPGGGLMARLLDGRSVAAQIRAEVAEGVSELKRRGVPVRLDVILAGEDPASVTYVSNKRRDCAEVGIESRLHAFPADVPQKELLALVERLNGDPEVSGFFIQLPLPGGVDPLPLLSAIDPSKDVDGLSPQSAGRLAVGLPSLLPCTPHGVIQLLRRSGVGLEGREAVVVGRSNLVGKPLALLLLRENATVTVCHSRTRDLAGVTRRAEVLVVAAGRRGMVGAEHVREGAVVVDVGIHRAEDGGLTGDVRQEEVAARAAALTPVPGGVGPMTRAMLLYNTLEAARLREERA

SEQ ID NO: 30231 - protein, 319 aa, Oryza sativa
MESGVYTVLFSDKEKEGMESFTNGDVRLLKHERSIIAEDDLDNRWQAATGEAVSEVIFLSKHTAVSNRPALTVHPIGVPHLREDETPPQGGRPGWAALPNPRIGPWLRLMQKIAVDQGLVPEFEITLEATHHGPVTNTPTMFVEIGSTEEYWCRQDAAQAIALVESFSLFSSTVYMFFVLDFQEELKVLWKGLGLDEGNTVGSWQGNSEKVLLGIGGGHYAPRHMDIVIKDGIWVGHLLSGYSLPMEVSPQGNGKSYSDVGGMWKHSIKVSYDATKAAFPGGQVIAHLDQKSFKGWQKNAIMSYLQELNIRIGKPNDFI

SEQ ID NO: 30232 - protein, 262 aa, Streptococcus pyogenes MGAS315
MSRILQRLDIASTATGFLGGFTGRFIEESLSAEGVKTDFVKGDQDTRINVKIKSQEETELNGQGPIISREQLEELKTKLSQLTAEDTVVFAGSAPANLGNAVYKELLPLVRQSGAQVVCDFEGQTLIDALAYNPLLVKPNNHELEAIFGTILTSLDDVETYARRLLEMGAQNVIISMAGDGALLVTKEATYFAKPIKGEVKNSVGAGDSMVAGFTGEFMKSQNPIEALKWGVACGTATAFSDDLATIAFIKETYHKVEVEKR

SEQ ID NO: 30233 - protein, 146 aa, Mesorhizobium loti MAFF303099
MRYLHTMVRVADVDASLDFYCNKLGLKEVRRYENEQGRFTLIFLAASEDEQSGINDKAPLIELTYNWDPEDYKGGRNFGHLAYEVDDIYATCQHLMDNGVTINRPPRDGNMAFIRSPDGISIELLQKGPAKAKAEPWASMANTGSW

SEQ ID NO: 30234 - protein, 963 aa, Arabidopsis thaliana
MAARNLEKMASIDAQLRLLAPGKVSEDDKLIEYDALLLDRFLDILQDLHGEDVREFVQECYEVAADYDGNRNTEKLEELGNMLTSLDPGDSIVVTKSFSNMLSLANLAEEVQIAYRRRIKKLKKGDFADEASATTESDIEETLKRLLQLNKTPEEVFDALKNQTVDLVLTAHPTQSVRRSLLQKFGRIRDCLTQLYAKDITPDDKQELDEALQREIQAAFRTDEIRRTPPTPQDEMRAGMSYFHETIWKGVPKFLRRVDTALKNIGINERVPYNAPLIQFSSWMGGDRDGNPRVTPEVTRDVCLLARMMAANLYFSQIEDLMFEMSMWRCNEELRVRAERQRCAKRDAKHYIEFWKQIPANEPYRAILGDVRDKLYNTRERARQLLSSGVSDVPEDAVFTSVDQFLEPLELCYRSLCDCGDRPIADGSLLDFLRQVSTFGLALVKLDIRQESDRHTDVLDAITTHLGIGSYKEWSEDKRQEWLLSELSGKRPLFGPDLPKTEEVADVLDTFKVISELPSDSFGAYIISMATAPSDVLAVELLQRECGITDPLRVVPLFEKLADLESAPAAVARLFSIEWYRNRINGKQEVMIGYSDSGKDAGRLSAAWQLYKTQEELVKVAKEYGVKLTMFHGRGGTVGRGGGPTHLAILSQPPDTIHGQLRVTVQGEVIEQSFGEEHLCFRTLQRFTAATLEHGMHPPVSPKPEWRVLMDEMAIIATEEYRSVVFKEPRFVEYFRLATPELEYGRMNIGSRPSKRKPSGGIESLRAIPWIFAWTQTRFHLPVWLGFGGAFKRVIQKDNKNLNMLKEMYNQWPFFRVTIDLVEMVFAKGDPGIAALYDRLLVSEELQPFGEQLRVNYQETRRLLLQVAGHKDILEGDPYLRQRLQLRDPYITTLNVCQAYTLKQIRDPSFHVKVRPHLSKDYMESSPAAELVKLNPKSEYAPGLEDTVILTMKGIAAGMQNTG

SEQ ID NO: 30235 - protein, 405 aa, Neisseria meningitidis MC58
MALIVHKYGGTSVGSPERIKNVAKRVAKARAEGHDIVVVVSAMSGETNRLVALAHEMQEHPDPRELDVVLATGEQVTIGLLAMALKDIGVDAKSYTGWQVALKTDTAHTKARIESIDDEKMRADLTAGKVVIVAGFQGISSEGDISTLGRGGSDTSAVALAAALKADECQIYTDVDGVYTTDPRVVPEARRMDTVTFEEMIELASLGSKVLQIRSVEFAGKYKVRLRVLSSLQDGGNGTLITFEEDDNMERAAVTGIAFDKNQARINVRGVPDKPGVAYQILGAVADANIEVDMIIQNVGSEGTTDFSFTVPRGDYKQTLEILSERQDSIGAASIDGDDTVCKVSAVGLGMRSHVGVAAKIFRTLAEEGINIQMISTSEIKVSVLIDEKYMELATRVLHKAFNLG

SEQ ID NO: 30236 - protein, 553 aa, Aspergillus nidulans FGSC A4
MPSFSQAVELPAWKELQDHHGSVGRNIVLKECFEKDPQRFEKFSRTFQNTVDNNEILFDFSKNFLTEETLALLVKLAKQAGVEELRDQMFAGEPINFTENRAVYHAALRNVSNQPMQVNGKSVVEDVNSVLEHMKEFSEQVRSGEWKGYTGKKINTIINIGIGGSDLGPVMVTEALKPYGHPDLKLHFVSNIDGTHIAEALKDSDPETTLFLIASKTFTTAETTTNANTAKSWFLEHAKDGAHIAKHFVALSTNAEEVAKFGIDTKNMFGFESWVGGRYSVWSAIGLSVALYIGYDNFHQFLAGAHAMDKHFRETPLEQNIPVLGGLLSVWYSDFFGAQTHLVAPFDQYLHRFPAYLQQLSMESNGKAITRTGEYVKYTTGPVLFGEPATNAQHSFFQLLHQGTKLIPADFIMAAESHNPVEGGKHQRMLASNFLAQSEALMVGKTPEQVKAEGAADNLVPHKTFLGNRPTTSILAQKITPAALGALITYYEHLTFTEGAIWNINSFDQWGVELGKVLAKKIQKELETEGEGSGHDSSTSGLLLAFKKKAKLA

SEQ ID NO: 30237 - protein, 395 aa, Triticum aestivum
  misc_feature (328)..(328): Xaa can be any naturally occurring amino acid
MAQSWAFFLLLVLCFCFVSDLICSSNGERVFLYPQSQKVSSIVSQRYRTAYHFQPPKNWINDPNGPMYYNGIYHEFYQYNPNGSVWGNIVWGHSVSTDLINWIPLETAIERDTPSDINGCWTGSATILPGNRLVIIYTGADPEKRQVQNIVVPKNLSDPYLREWTKAGNNPVIQPVGPGLNSGQFRDPTTGWIGPDGLWRIAVGAELKSYTAALLYKSEDFLSWTRVDHPLYSQNLSNIVECNMWECLDFFAVLPGNNTGLDMSAAILRGTKHALKMSVGYFDKYLIGVYDLKRDAFVPDTIVDDCRLWLKIDYGNFYASKSFFDSKXGRRIIWGWSKEADCRSDDVAKGWAGIHTIPRTIWLDSNGKQLLQWPVDEIESLRTNEINHQGLELNK

SEQ ID NO: 30238 - protein, 469 aa, Rhodopseudomonas palustris CGA009
MPIQVLMPALSPTMEKGNLSKWLKKEGDKVKSGDVIAEIETDKATMEVEAADEGTLGKILIPEGTNDVAVNTPIATILGDGESAADADKASDPAAQSKASQSAPPSAEPEAAQAKSAPAPAQHAPEAPTVSAAADPDIPAGTEMVTVTIREALRDAMAEEMRRDPDVFVMGEEVAEYQGAYKVTQGLLQEFGDRRVIDTPITEHGFAGVGVGAGFAGLKPIVEFMTFNFAMQAIDQIINSAAKTLYMSGGQLGCSIVFRGPNGAASRVAAQHSQDYSAWYAQIPGLKVVAPYSAADAKGLLKAAIRDPNPVIFLEHEMLYGQHGEVPKLDDYVIPIGKARIVREGKDVTLISWSHGMTYALKAADELAKDGIAAEVIDLRTLRPLDTDTIIASVKKTGRAVTIEEGWQQNGVGAELSARIMEHAFDYLDAPVTRVSGKDVPMPYAANLEKLALPSVAEVVEAAKAVCYR

SEQ ID NO: 30239 - protein, 601 aa, Coccidioides immitis RS
MPVDTSQRLAKLRELMKERHVDVYLIPSEDSHQSEYIAPCDARRGCAIVSMSKAALSTDGRYFNQAAKQLDENWLLLKRGMENVPTWQEWTAEQAEGGKVVGVDPSLITAAEARKLSDTIKNTGGSLVGVPDNLVDLVWGGDRPARPREKVMVHPIEFAGQSFEEKITDLRKELTKKKRAGMVISMLDEVAWLYNLRGADIPFNPVFFAYAIVTHSTAELFVDEAKLTQAVKEHLGDKVALRPYESIFESLKLLSQAVASNGDDGHQKFLLSDKASWSLNLALGGEEKVEEVRSPIADAKAVKNAVELEGTRACHIRDGAALTEYFAWLENELIIKKTVLNEVDASDKLAQIRSKHKDFVGLSFDTISSTGPNAAIIHYRAERGNCPNIDPNAVYLCDSGAQYLDGTTDTTRTLHFGKPTEMEKKAYTLVLKGLISIDTAVFPKGTTGYAIDAFARQHLWRNGLDYLHGTGHGVGSYLNVHEGPMGIGTRVQYAEAPITAGNVLSDEPGYYEDGNFGIRIENIVVAKEVKTPHKFGDKPWIGFEHVTMTPLCQNLMDTSLLTAEEKKWVNDYHTEVWEKTKGFFDNDELTRNWLKRETQPI

SEQ ID NO: 30240 - protein, 412 aa, Arabidopsis thaliana
SENCNSRHFSWLMKSCLPNPSDAKSLVQIHQPSSTAANSSATIASLPDDLLLECISRVPSSSIPSLAVVCRRWSRLLHSPYFLHLRRRLGLLRHSLFAISTVDSGLFAADLQFQSEIASWKVSLAVSSRSVGVDGSYGSLSHARAAAIGPRVYVVSRNAVLRYDSWMGTLNLRSPMIFPRKKFAIAVVSGKIYVAGGGGGSEVAAAVEEYDPELNRWEVVTQSARKRYGCIGAAVDGVFYVIGGLKIGNETSRAVAARAYASSMDLFDVESRQWLRSRSVPGGGCVVAACAAVGYVYVLTSHAVELSFWRFDARRRGGNSGFGEWQRLKSPPLPAQVRLDGTVRFSCVGVEDKVAVVQVVGCIDDLLRRSGRGERGIRESLVLLYDTTEGEWRRAADLPEMITRAACACVEW

SEQ ID NO: 30241 - protein, 412 aa, Silicibacter pomeroyi DSS-3
MPTLVMKFGGTSVANLDRIRRAAKRVGVEVAKGYDVIVIVSAMAGKTNELVGWVNETSPLFDAREYDAVVSSGENITAGLMALTLQEMDIPARSWQGWQVPLMTNSAHSQARIEEIPPHNINQKFAEGMKVAVIAGFQGVSPEGRITTLGRGGSDTTAVAFAAAFEADRCDIYTDVDGVYTTDPRICTKARKLEKISFEEMLELASLGAKVLQTRSVELAMRYKVKLRVLSSFEEQSDTAGTLVVDEEEIMESNVVSGVAYSRDEAKMTVVSVQDRPGVAATIFNALSEGGVNVDMIVQNVSEEGITDMTFSCPTDQVARAEKAMNAVKDAGELEFEDLLVDYDVCKVSVVGIGMRSQSGVAAKMFKILSDEGINIKVITTSEIKISVLIDRKYMELAVQALHDAFELDKAA

SEQ ID NO: 30242 - protein, 460 aa, Cryptococcus neoformans var. neoformans JEC21
MTAELTPSIEEQALTSPGPFEGPEKLLEVWFAPSIEELPSAEEVEGKVAGGLNARPAKENGEWQGLRKVPREVWEEMLDIVKCKVLSMVEGDDLDAYLLSESSLFVAPHVLILKTCGTTLNLLGLYRIIEIAREYCGFNNVWRCFYSRKSFFFPERQQGPHRDWRDEVQFLDSVFGTAGAAYTVGPMNRDHWLLYLTTPNSQPILPSDPKPCTLSLPAPSPSSSIPTFSSSSTVTYQDTTLEILMTHLSPSARAPFFHDSDSFSSPSTTPGHVLGEAISHKLGIDALFSKDETTLDSFGFDPCGYSANAVIGSGLPVSGKGGKEGGGYFTIHVTPEEGWSYASFECNVPLPFSSSSSPGALAKRPDLQTLIRNVVNIFQPSRLSITLFVSTPPSSSGPGSSEAEVKAWNSFGTDLLGNEFVRKDRIGYEFDGYDLVFACFEKKGWVESQLALGSETKKSL

SEQ ID NO: 30243 - protein, 665 aa, Oryza sativa
MVPVSTKISPLLEVVTPIPQEDRKRQADLKEVPAIVASALILLALATSILAWALTEVESPGEVTSGEDQTEPVVPDMEMAEPSKGVSEGVTERTYSGVLLASGHATSTEYVWSNVMLVWQRTVFHFQPEKNWMNDPNGPLYHKGWYHIFYQWNPEGAAWGNKISWGHAVDSKDLLHWYHLPWAMYPDQPYDLNGVWTGSATTLPDGKLAMLYTGETEDELVQDQCLADPVNPTDPLLVDWVKYSVNPVIYPPPGIGVKDFRDPTTACRSPAGNDTRLITIGSKLGKTGISLVYETTNFTTFKLLYGVLHAVPGTGMWECVDLYPVSTKSVIVITQENGLDTSVHGLGVKHVLKTSFDDDKHDYYALGTYDLQADTFVPDDPDLDVGIGLRLDYGKYYAARTFYNQNKQRRILWGWIGETDLEAVDPMKGWASLQAIPRSIVFDKKTGTNVLQRPEEEVESWSTRSKTFHDISFEPGSVVPIHVTGATQLDITASFEVDETLLETTSESHDAGYDCSNSGGAGTRGSLGPFGLLVVADEKLSELTPVYLYVAKGGEGKAKAHLCTYQTRSSMASGVEKDVYGSAVPVLDGENYSARILTDHSIVESFAQAGRTSVRSRDYPTKDIYGAARSFFFNNATEASVRASLKAWQTKSFIRPYPFIPDPKS

SEQ ID NO: 30244 - protein, 475 aa, Rickettsia montanensis
MNLLKNITGKNYINGEFIEFGKQISVINPATLKEIATVPNLGLSEINSAINNTVTSFSSWSQSSFEARIAILRRWYNLVIENIEELSHILTLEQGKVLAESKKEILYGVSFIDWYTYAIHNIHSTIKPGNSKAHKIVTQYEPVGPSAAITPWNFPNAMITRKVVPAIAAGCSVILKPSSLTPLSALVLAKFASDAGLPAGVFNVITGSSDIIGKAFCEDFRLRKLSFTGSTNVGKILYQNAANTLKRLSLELGGNAPFIITADNNLEKVVSDLITAKTRNSGQSCISPNRIFIEESIYEKFIEILKAKFTKLKAGDGFDKESDVGPLINSAAIEKIQKLLADAQSKGAKLICGGKAVDNFIEPTIIIDCLDNMDIFRTEIFGPVVACYKFKDLDEVIERANNTEYGLQGYVYSNNISVVQMIASKLDFGMVSINDPLPANAKAPFAGRKASGFGVEGSFEGIFEYLNTKYINLQH

SEQ ID NO: 30245 - protein, 346 aa, Glycine max
MSSSLMLPAASMLRPCTTSSSSCTSSRRLALFHLVSTGSIALPQAQLFGAKGPELLRVVEASAAEKLAQPEKDLFDWVKNDNRRFLHVVYRVGDLEKTIKFYTECLGMKLLRQRDIPEDRYSNAFLGYGPEDSNFTVELTYNYGVDNYDIGSGFGHFGVAVEDIYKRVDLVKAKGGKVTREPGPVKDGSAVIAFIEDPDGYKFELLERRPTSEPLCQVMLRVGDLDRAIAFYEKAVGMKLLRKRDNPEQKYTVAFMGYGPEDKNTVLELTYNYGVTNYDKGNGYAQIAIGTNDVYKTAEAIKLCGGKIILEPGPLPGINTKIVACLDPDGWKLAFVDNVDFLKELE

SEQ ID NO: 30246 - protein, 475 aa, Rickettsia rickettsii
MNLLKNITGKNYINGEFIEFGKQISVINPATLKEIATVPNLGLSEINSAINNTVTSFALWSQSSFEARIAILRRWYNLVIENIEELSHILTLEQGKVLAESKKEILYGASFIDWYTYAIHNIHSTIKPGNSNTHKIVTQFEPVGPSAAITPWNFPNAMIARKVVPAIAAGCSVILKPSSLTPLSALVLAKFASDAGLPSGVFNVITGSSDIIGKAFCEDFRLRKLSFTGATNVGKILYQNAANTLKRLSLELGGNAPFIITADNNLEKVVSDLVIAKTRNSGQSCTSPNRIFIEESIYEKFIEILKAKFTKLKAGDGFDKESDVGPLINSAAIEKIQKLLADAQSKGAKLICGGKTVDNFIEPTIIIDCLDNMDIFRIEIFGPVVACYKFKDLDEVIEHANNTEYGLQGYVYSNNISVAQMIASKLDFGMVSINDPLPANAKAPFAGRKASGFGVEGSFEGIFEYLNTKYINLQN

SEQ ID NO: 30247 - protein, 320 aa, Thermoplasma volcanium GSS1
MEFNLRSVSTEAKERDFDVIIIGAGAAGFSAAVYASRSGLSAVILDKNVAGGLTAEAPLVENYLGFKSIVGSDLAKNFAEHASEYASIREGVEVKSVKKGDGGFIVDTSDGEYHSKYIIITTGTTHKHLGVKGEAEYFGKGVSYCSTCDGYLFKNKNVVTIGGGNSGAIAAISMSEYVKNATIVEYMPRYMCENAYIEEIKKRKIPYIMNAQVTEIVGDGKKVTGVKYKDRSSGEEKTLPADGVFVYVGLIPQTSFLKDSGVKLDERGYIIVDGRQRTNVPGIYAAGDVTSGSFAQIASAVGDGCKAALSLYSDTISSKK

SEQ ID NO: 30248 - protein, 310 aa, Salmonella enterica subsp. enterica serovar Typhi str. CT18
MVRIYTLTLAPSLDSATITPQIYPEGKLRCSAPVFEPGGGGINVARAIAHLGGTATAIFPAGGATGEHLVALLADENVPVSTVDAKDWTRQNLHVHVESSGEQYRFVMPGATLDDDEFRQLEEQVLEIESGAILVISGSLPPGVKVEKLTQLISAAQKQGIRCIIDSSGDALTAALALGDIELVKPNLKELSALVNRDLTQPDDVRKAAQELVQSGKARRVVVSLGPQGALGIDSENCIQVVPPPVKSQSTVGAGDSMVGAMTLKLAQDASLEEMVRFGVAAGSAATLNQGTRLCSHDDTQKIYAYLSAQ

SEQ ID NO: 30249 - protein, 356 aa, Ralstonia solanacearum
MTKIAVLPGDGIGTEIVAEAVKVLKTLGETFEMETAPVGGAGYEAKGHPLPEDTLKLAKEADAILFGAVGDWKYDTLPRELRPEQAILGLRKHLQLFANFRPAICYPELAGASSMKPEIVAGLDILIVRELTGDIYFGQPRGVRAAPDGLFAGAREGFDTMRYSEPEIRRIAHVAFQAAAKRGKKLCSVDKANVLETFQFWKDIVTDVHKEYPEVELSHMYVDNAAMQLVKAPKNFDVVVTGNMFGDILSDEAAMLTGSIGMLPSASLDANNKGLYEPSHGSAPDIAGKGIANPLATILSAAMMLRYTLGKAEQADRIENAVKKVLAQGYRTGDILTPGCKQVGTVEMGDAVVAAL

SEQ ID NO: 30250 - protein, 284 aa, Streptomyces coelicolor A3(2)
MTAQILDGKATAAAIKSELTARVAALKERGVTPGLGTVLVGDDPGSQKYVAGKHRDCAQVGIASIQRELPATATQEEIEAVVRELNEDPACTGYIVQLPLPRGIDENRILELMDPDKDADGLHPMNLGRLVLNEPAPLPCTPNGILTLLRRYGVEIKGAEVVVVGRGVTIGRPMPLLLTRRSENATVTQCHTGTRDLAAHLKRADIVIAAAGSPHLVRPEDVKPGAAVLDVGVSRNAEGKIMGDVHPGVAEVAAWISPNPGGVGPMTRAQLLVNVVEAAERSAG

SEQ ID NO: 30251 - protein, 664 aa, Silicibacter sp. TM1040
MAAKDTDDRKPDDQDAEISLDMSQAQVKKMIAEAREKGYITYDQLNQVLPPDQVSSEQIEDVMSMLSEMGINIIEDEEAEEEENKGTTELVTTESNREVAVAGAATEKLDRTDDPVRMYLREMGSVELLSREGEIAIAKRIEAGRNTMILGLCESPLTFQAITIWHDELLSEDILLRDVIDLEATFGNQMDEDGDVAEPVVDPSAVSGAAKPEKDSGPELDADGNPILNNDDDDDDDDDQANMSLAAMEAALKDRVLETLERISSDFAMLSEMQDLRISATLNEDGSFSADDEAKYQQLRSEIVELVNGLHLHNNRIEALIDQLYGINRRVMQIDSAMVKLADQARINRKEFVEAYRGRELDPNWLSEMSEKPGRGWQMFIERSTEKVEELRADMAQVGQYVGLDISEFRRIVQQVQKGEKEARQAKKEMVEANLRLVISIAKKYTNRGLQFLDLIQEGNIGLMKAVDKFEYRRGYKFSTYATWWIRQAITRSIADQARTIRIPVHMIETINKLVRTGRQMLHEIGREPTPEELAEKLQMPLEKVRKVMKIAKEPISLETPIGDEEDSQLGDFIEDKNAVLPLDSAIQENLKETTTRVLASLTPREERVLRMRFGIGMNTDHTLEEVGQQFSVTRERIRQIEAKALRKLKHPSRSRKLRSFLDQ

SEQ ID NO: 30252 - protein, 964 aa, Nicotiana tabacum
MATRSLEKLASIDAQLRALVPGKVSEDDKLVEYDALLLDRFLDILQDLHGEDLKETVQECYELSAEYEGKHDPKKLEELGNVLTSLDPGDSIVIAKAFSHMLNLANLAEEVQIAYRRRQKLKRGDFADENNATTESDIEETFKKLVGDLKKSPQEVFDALKNQTVDLVLTAHPTQSVRRSLLQKHGRIRDCLAQLYAKDITPDDKQELDEALQREIQAAFRTDEIRRTAPTPQDEMRAGMSYFHETIWKGVPKFLRRVDTALKNIGINERLPYNAPLIQFSSWMGGDRDGNPRVTLEVTRDVCLLARMMAANLYYSQIEELMFELSMWRCNDDLRIRAAELYRSSRRDTKHYIEFWKTIPPSEPYRVILGDVRDKLYQTRERTRQMLAHGISDIPEDATYNNVEQFLEPLELCYRSLCECGDRPIADGSLLDFLRQVSTFGLSFVRLDIRQESDRHTDVLDAITQHLEIGSYREWSEERRQEWLLSELSGKRPLFGPDLPRTEEIADVLDTLHVIAELPSDCFGAYIISMATAPSDVLAVELLQRECHVKQPLRVVPLFEKLDDLESASAAVARLFSIEWYRNRINGKQEVMVGYSDSGKDAGRFSAAWQLYKAQEELIKVAKEHGVKLTMFHGRGGTVGRGGGPTHLAILSQPPDTIQGSLRVTVQGEVIEQSFGEEHLCFRTLQRFTAATLEHGMHPPVSPKPEWRALMDEIAVIATEKYRSIVFKEPRFVEYSALATPELEYGRMNIGSRPSKRKPSGGIESLRAIPWIFAWTQTRFHLPVWLGFGAAFKYAIDKDIKNLRMFHEMYNEWPFFRVTIDLVEMVFAKGNPGIAALYDKLLVSEDLLPFGELLRSNYEETRSLLLQIAGHKDLLEGDPYLKQRLRLRDSYITTLNLLQAYTLKRIRDPNYHVTLRPHISKDYMESKSAAELVQLNPTSEYAPGLEDTLILTMKGIAAGLQNTG

SEQ ID NO: 30253 - protein, 717 aa, Saccharomyces cerevisiae
MEQTQTAEGTDLLIGDEKTNDLPFVQLFLEEIGCTQYLDSFIQCNLVTEEEIKYLDKDILIALGVNKIGDRLKILRKSKSFQRDKRIEQVNRLKNLMEKVSSLSTATLSMNSELIPEKHCVIFILNDGSAKKVNVNGCFNADSIKKRLIRRLPHELLATNSNGEVTKMVQDYDVFVLDYTKNVLHLLYDVELVTICHANDRVEKNRLIFVSKDQTPSDKAISTSKKLYLRTLSALSQVGPSSSNLLAQNKGISHNNAEGKLRIDNTEKDRIRQIFNQRPPSEFISTNLAGYFPHTDMKRLQKTMRESFRHSARLSIAQRRPLSAESNNIGDILLKHSNAVDMALLQGLDQTRLSSKLDTTKIPKLAHKRPEDNDAISNQLELLSVESGEEEDHDFFGEDSDIVSLPTKIATPKNWLKGACIGSGSFGSVYLGMNAHTGELMAVKQVEIKNNNIGVPTDNNKQANSDENNEQEEQQEKIEDVGAVSHPKTNQNIHRKMVDALQHEMNLLKELHHENIVTYYGASQEGGNLNIFLEYVPGGSVSSMLNNYGPFEESLITNFTRQILIGVAYLHKKNIIHRDIKGANILIDIKGCVKITDFGISKKLSPLNKKQNKRASLQGSVFWMSPEVVKQTATTAKADIWSTGCVVIEMFTGKHPFPDFSQMQAIFKIGTNTTPEIPSWATSEGKNFLRKAFELDYQYRPSALELLQHPWLDAHII

SEQ ID NO: 30254 - protein, 554 aa, Candida albicans SC5314
MGSSTNNTQSKATPSVLENEVNSSKSSVVSSTSSAKGLLRETTNHGTMETSSVQISESESRPSKMVLVLTLASSISGFMFGYDTGYISSALVQIGTDLSNKILTSGEKEFITSATSLGALLGAVVGGVLANLIGRRRVLLGSNIIFVVGTIIQLAARTVWTMIAGRFVLGWGVGIASLIAPLMISELAPAKYRGRLIVTNVIFITGGQLIAYFINWGLTRVSHGWRVSVGLCMVPPVLQFVLFWFLPDTPRFYVMNGNFEKARQVLRKVHVDPSDEFVNATIDEMIASDSTVPGNGPLQKAWKSIKIIHTTPGNFRALILACGLQGIQQFTGFNSLMYFSATIFETIGFHNATAVSIIIAATNFVFTGIAICIIDKVGRRRILLVGMPCMCISLIVCAVAFHYLNVDFSTGTVVSRGINGWGIVVIIGMILYVASYAIGIGNAAWVGVELFSDVNVRSIGAMYAACTNWAGSLVIASTFLTMLENITPTGTFSFFAGLCFIAFFFVYFLLPDTAGLELEETTDFLSNGFNVKQAAQLSKERKKHSKFAKSKPTV

SEQ ID NO: 30255 - protein, 315 aa, Wolbachia sp.
LCDKKIQLGINLTKGLGAGALPDVGKGAAEESIDEIMEHIKDSHMLFITAGMGGGTGTGAAPVIAKAAREARAVVKDKGAKEKKILTVGVVTKPFGFEGVRRMRIAELGLEELQKYVDTLIVIPNQNLFRIANEKTTFADAFQLADNVLHIGIRGVTDLMIMPGLINLDFADIETVMSEMGKAMIGTGEAEGEDRAISAAEAAISNPLLDNVSMKGAQGILINITGGGDMTLFEVDSAANRVREEVDENANIIFGATFDQAMEGRVRVSVLATGIDSCNDNSSVNQNKIPAEEKNFKWPYNQIPTLETKEYASTE

SEQ ID NO: 30256 - protein, 110 aa, Caulobacter crescentus CB15
MSTVAVTDATFEADVLKSSKPVLVDFWAEWCGPCKQIAPALEQLSEELADVVTIAKVNIEDSPTTPSRYGVRGIPTMMLFRDGQMTSMKVGAMPKQKILEWLNEAGVQAA

SEQ ID NO: 30257 - protein, 189 aa, Triticum aestivum
  misc_feature (25)..(25): Xaa can be any naturally occurring amino acid
  misc_feature (104)..(104): Xaa can be any naturally occurring amino acid
  misc_feature (126)..(126): Xaa can be any naturally occurring amino acid
  misc_feature (150)..(150): Xaa can be any naturally occurring amino acid
PLRCARFPRAVRNLTWPCRRWWSTXVVFPPVARPPGSAGSHFLGGAGVRGLEIGGNFIKFTAIGVYLEDAAVPALAKKWGGKTADELASDAAFFRDVVTGDFEXFTRVTMILPLTGEQYAEKVTEXCVAFWKAAGLYTDAEGSRGEFKEXFQAKDFAPGASSSYASPAGSQRRLSRISVNGRAGKHALR

SEQ ID NO: 30258 - protein, 339 aa, Rubrobacter xylanophilus DSM 9941
MARRITFMQAINEALRQEMERDETVVVFGEDNAGGAGAPGEDDAWGGVMGVTKGLYPSFPGRVLDTPISESAFIGAAAGAACSGLRPVAELMFVDFMGVCFDQIFNQAAKFRYMFGGKAKTPMVIRTMYGAGIRAASQHSQSLYPIFTHIPGLKVVVPSNPYDAKGLMIASIRDDDPVIFFENKVLYQMEGEVPEEPYAIPLGEAEYVREGEDVTIVAIGRMVSMAEQAAEALADEGIECEIIDPRTTSPLDTETVFESVENTGRLVVVDESNPRCSLAADICALVAQERFEDLKAAPKMVTAPHTPPPFSPALEDLYVPDPERIAAAVREVAGAGARA

SEQ ID NO: 30259 - protein, 664 aa, Arabidopsis thaliana
MASSDALLPISAREEEPLCPYTRLPMADPNQETHGPRRRRPFKGLLAVSFGLLFIAFYVALIATHDGSRSNDEGIDETETITSRARLAGVSEKRNDGLWKLSGDRNTPAFEWNNSMLSWQRTAFHFQPEQNWMNDPNGPLFYKGWYHFFYQYNPNAAVWGDIVWGHAVSRDLIHWVHLPIAMVADQWYDSNGVWTGSATFLPDGSIVMLYTGSTDKAVQVQNLAYPEDPNDPLLLKWVKFPGNPVLVPPPGILPKDFRDPTTAWKTSEGKWRITIGSKLNKTGISLVYDTIDFKTYEKLDTLLHRVPNTGMWECVDFYPVSKTAGNGLDTSVNGPDVKHIVKASMDDTRFDHYAVGTYFDSNGTWIPDDPTIDVGMTASLRYDYGKFYASKSFYDQNKGRRVLWSWIGESDSEASDVQKGWSSLQGIPRTVVLDTKTGKNLVQWPVEEIKSLRLSSKQFDLEVGPGSVVPVDVGSAAQLDIEAEFEINKESLDKIIGNASVVAEAEEFSCEKSGGSTVRGALGPFGFSVLATESLSEQTPVYFYVAKGKDSELKTFFCTDTSRSSVANDVVKPIYGSVVPVLKGEKLTMRILVDHSIVEAFGQGGRTCITSRVYPTTAIYGAAKLFLFNNALDATVTASFTVWQMNSAFIHPYSDEAVRALSRT

SEQ ID NO: 30260 - protein, 362 aa, Saccharomyces cerevisiae
NAQKRSPTGIVLMNMGGPSKVEETYDFLYQLFADNDLIPISAKYQKTIAKYIAKFRTPKIEKQYREIGGGSPIRKWSEYQATEVCKILDKTCPETAPHKPYVAFRYAKPLTAETYKQMLKDGVKKAVAFSQYPHFSYSTTGSSINELWRQIKALDSERSISWSVIDRWPTNEGLIKAFSENITKKLQEFPQPVRDKVVLLFSAHSLPMDVVNTGDAYPAEVAATVYNIMQKLKFKNPYRLVWQSQVGPKPWLGAQTAEIAEFLGPKVDGLMFIPIAFTSDHIETLHEIDLGVIGESEYKDKFKRCESLNGNQTFIEGMADLVKSHLQSNQLYSNQLPLDFALGKSNDPVKDLSLVFGNHEST

SEQ ID NO: 30261 - protein, 157 aa, Zea mays
  misc_feature (74)..(74): Xaa can be any naturally occurring amino acid
  misc_feature (86)..(86): Xaa can be any naturally occurring amino acid
  misc_feature (92)..(92): Xaa can be any naturally occurring amino acid
MAAPKLATLALAVLLAATVVAPPAAVRAAMSCSTVYSTLMPCLPFVQMGRAMPPQPCCGGIRSLLQQANNTPDXPHICGCPQNVAXGRNGSXTYISRRAALPSKVRVALPYKISTNVYWHTINKMRRPVAPPEECMHGGKEKRNGYWDFAKTGGGRP

SEQ ID NO: 30262 - protein, 124 aa, Schizosaccharomyces pombe
VNIIKKRTKPFKRHQSDRFKRVGESWRKPRGIDSCVRRRFRGTISMPKIGYGNNKKTRYCMPNGLKAFLVRNVSDVELLLMHNKTYAAEIAGNVSARKRVEIVEKARALGVKVTNAGAKVRSQE

SEQ ID NO: 30263 - protein, 462 aa, Glycine max
MNSIAFKSFVGLRQSSPEAPHFAAQPRPATPHRKFRVLAGKFSPKLNGRNLRVAVVGGGPAGGAAAETLAKGGVETFLIERKMDNCKPCGGAIPLCMVGEFDLPLDIIDRRVTKMKMISPSNVAVDIGRTLKPHEYIGMVRREVLDAYLRDRAKEYGANVINGLFLKMDIPKDKNSPYVLHYSSYDGKTNGAGEKRTLEVDAVIGADGANSRVAKSIDAGDYEYAIAFQERVKIPDDKMVYYENLAEMYVGDDVSPDFYGWVFPKCDHVAVGTGTVTHKGDIKKFQLATRKRAEDKILGGKIIRVEAHPIPEHPRPRRLLGRVALVGDAAGYVTKCSGEGIYFAAKSGRMCAEAIVEGSENGKRMVEEGDLRKYLEKWDKTYWPTYKVLDILQKVFYRSNPAREAFVEMCADEYVQKMTFDSYLYKTVVPGNPLEDLKLAINTIGSLVRANAIRREMKKLNV

SEQ ID NO: 30264 - protein, 477 aa, Exiguobacterium sibiricum 255-15
MSLTRKKDVSAMIAASQRNSGLARNLGAMDLTFLGIGAIIGTGIFVLTGTGALTAGPGLIVSFILSAIACGLAALAYAEFASTIPVSGSVYTYTYATMGEIFAWIIGWNLILEYGLASSAVAAGWSGYFQSLLGGFGIHLPTALSAAPGAVEGAKTFFNLPAFLILLAITGLLSMGIKETKRVNNIMVIIKLAVVVLFIVVGVGYVEPTNWAPFTPFGWGGVFSGAAIVFFAYIGFDAVTSAAEEVREPQKNLPRGIIGSLAVCTVLYVIVAAIMTGIVPYQKFAGVDHPVSLAIQMAGQNWVAGFIDLGAILGITTVILVMTYGMVRLAFAISRDGMFPKVFSEVHPKYKTPFKATWMIGLGSATVAGLVPLDVIANLVNMGTLAAFVLISVAVLILRKTQPDLPRAFKCPGMPYVPIAAIASCLFLMFNLKLETWIAFFIWLAIGLVLYFAFARKNSNLEPGNMPAAELAASDDK

SEQ ID NO: 30265 - protein, 326 aa, Pseudomonas fluorescens
MVEVRHSRVIILGSGPAGYTAEDFNWSRKQGFRVVQAEECWHKSLEPLMAEVREVDNWPGDVHGLTGPALMERMREHAERFETEIVFDHINAVDFAAKPYTLTGDSATYTCDALIIATGASARYLGLPSEEAFMGKGVSACATCDGFFYRNKPVAVVGGGNTAVEEALYLANIASTVTLIHRRETFRAEKILIDKLNARVAEGKIILKLNANLDEVLGDNMGVTGARLKNNDGSFDELKVDGVFIAIGHTPNTSLFEGQLTLKDGYLVVQGGRDGNATATSVEGIFAAGDVADHVYRQAITSAGAGCMAALDTERYLDGLQNASEW

SEQ ID NO: 30266 - protein, 292 aa, Desulfitobacterium hafniense DCB-2
MSIIIDHTTPVLIQGITGKEGSFWAKHAKNYGTHIVAGVTPGKEGQDVDGIPVYHTVRRAVQEHPIEASLLVVPPKAAKGAVLEALDSGIKVIVVTAEGIPLHEMMQLRKIALEKQAMVIGGNTTGIISTGKAMMGFFPYWLDRVYKPGRVGVMTRSGSLTNEVTAEIVKAGFGPSSIVGVGGDPVPLTRFAEILPLFEKDPDTDAVVMIGEIGGTMEEDVAEAIEQRIFTKPLIGFMGGRTAPKGQKMGHAGAIITAGKGTVEDKVEALAKAGALVADRPSMIGQLLQKVL

SEQ ID NO: 30267 - protein, 347 aa, Medicago truncatula
MGVDYYKILQVDKNANDDELKKAYRKLAMKWHPDKNPTNKKDAEAKFKQISEAYEVLADPEKKAIYDQYGEEGLKGQVPPPDAGSGGGTSFYSTGDMPGSFRFNPRNADDIFAEFFGFSSPFGGMGGRGGGGGMRSRFSGGMFGDDMFGSFGEGGGIHMSQAAPRKAPAIENKLSCTLEEIYRGTTKKMKISREIADVSGKTMPVEEILTITVKPGWKKGTKITFPEKGNEQPNVTAADLIFVIDERPHSVFSREGNDLIVTQKISLAEALTGYTVHLTTLDGRNLSIPINNVIHPNYEEVVPKEGMPLPKDPTKKGNLRIKFNIKFPTRLTDEQKAGVRKLLASSA

SEQ ID NO: 30268 - protein, 113 aa, Triticum turgidum subsp. durum
AQVMLMAVALVLMLAAVPRAAVAIDCGHVDSLVRPCLSYVQGGPGPSGQCCDGVKNLHNQARSQSDRQSACNCLKGIARGIHNLNEDNARSIPPKCGVNLPYTISLNIDCSRV

SEQ ID NO: 30269 - protein, 326 aa, Zea mays
MASPIPREWVGLQQFPPATQTELHELLGKLKEEDVSTLTILVMGKGGVGKSSTVNSIVGERIATVSAFQSEGLRPMMWSRTRAGFTLNIIDTPGLIEGGYINEQAVDIIKRFLLGKTIDVLLYVDRLDAYRMDTLDGQVIRAITNSFGKDIWRRSLVVLTHAQLSPPDGIEYNDFFTRRSEALLRYIHSGAGIKKREYGDFPLPIALVENSGRCKTNEHGEKILPDGTPWVPKLMKEITVVISNGSKPIHVDQKLIDGPNPNNRWKMFIPIILAVEYFLVVKGIRRAIHADIANGKVDDWEQRYRDLVGSRDPVEQKGSTTRNRKA

SEQ ID NO: 30270 - protein, 860 aa, Arabidopsis thaliana
MRSEITRETKLLFDLPQDVIEEIFSKVPVTCLRRIRSTCKRLYALLKDRGFIRKHFAKSARQYHALMLKNFRFYSVSFNPNGTEMDVASLFNGERSLIDPYSSSEAIISQAFHCDGLLLCTTKENRLVVLNPFSGQTKWLQPQNRCKIDEAYVLGYDNSDLCHSYKILSFPDLYEQELETIKNAGRDLDVTPEGDLELKTDDFSSNSWRRNLGVTPHGGLGLKIYDFSSNSWKKLDVITPEGCLKSYGVSLKGNAYWVYMSKRRGVNDYSLLSFDFSTESFQHLCVPFHQEADCFGTMALSVVREEHLSLLYQSCETLKVEIWMTKEIDTTFVSWKKFLTVDLEPHLPHLLMFSCRMSFFIDEEKKVAVCCDRDNKVHVVGEDEYRVSSGQKPQDKQTRMFTDLPRDLETEILSRVPATSLQKLKPTCKRWYTLFKDPEFLKKHVGRAEREVISLMSLRVYSLSVNLSGIHSSVEMTGMLNSLKDSEDVKISDITECNGLLLCTTDDSRLVVWNPYTGETRWIPYKSNSPYEMYQKFVLGYDNTNKSRYSYKILRCYHGLIDFGYEFEIYEFNSHSWRRFYDNSPNCSFESKGVTLKGNTYWFASDTEGRHIILRFDFATERFGRLSLLYQSGGYVDNVVETGVLSAVREEKLALLYERFDELNDSSEMKIWVTNTKIVEAKDLSWSDFLVVDSSKFMVTRMTNVMSFLVDEEKKMVVVCDTDIDQHMNRFYIVGEDIYKEVYKDIAQGWFSYWPLLISYAPSLVQIQQVILRITIRYIEMGKSKKMSTLSVIRALLPCCSNSGDDWSDEGVIIRSRIMTSDEDGRLWIAEPGVDRRATSYIARFYENRVSDPNYKTLSP

SEQ ID NO: 30271 - protein, 398 aa, Guillardia theta
MYFIQNIKCYQFDKKNIFKTINKFRCRSQSLIKSNISEDSFFNQEISSSPCVIKVIGVGGGGGNAVNRMVGGVEGVEFWSINTDAQALSRSLAPNTCNIGAKLTRGLGAGGNPEIGRKAAEESRDLIAEAVSAGDLVFVTAGMGGGTGSGAAPIVAEVAKEMGCLTVGVVTKPFAFEGKRRMQQANDAILNLRNKVDTLIVVSNDKLLQIVPDNTPLQDAFSVADDILRQGVVGISEIIVRPGLINVDFADVRSVMADAGSALMGIGTGSGKTRAQDAAVAAISSPLLDFPIEKARGIVFNITGGQDMTLHEINSAAEVIYEAVDSNANIIFGALVDDNMENEISITVVATGFTQPNDSKFFSTKSAVDFSKIYDNKKTKSTYKESRAEFSDLWKKFY

SEQ ID NO: 30272 - protein, 206 aa, Brucella suis 1330
MSRTLVLVRHGQSEWNLKNLFTGWRDPGLTEQGHAEAKAAGQRLKAAGLKFDIAYTSALSRAQVTCQHILDELGQPGLETIRDQALNERDYGDLSGLNKDDARAKWGEEQVHIWRRSYDVPPPGGESLKDTGARVWPYYLHTIQPHVLREETVLVAAHGNSLRALIMALDGLTPEQILKQELNTGVPIIYRLNADSTVASKEILSA

SEQ ID NO: 30273 - protein, 960 aa, Sorghum bicolor
MERLSSIDAQLRMLVPGKVSEDDKLIEYDALLLDRFLDILQDLHGDDLKEMVQECYEVAAEYETKHDLQKLDELGKMITSLDPGDSIVIAKSFSHMLNLANLAEEVQIAYRRRIKLKKGDFADENSAITESDIEETLKRLVVDLKKSPAEVFDALKSQTVDLVLTAHPTQSVRRSLLQKHSRIRNCLVQLYSKDITPDDKQELDEALQREIQAAFRTDEIRRTQPTPQDEMRAGMSYFHETIWKGVPKFLRRVDTALKNIGINERVPYNAPLIQFSSWMGGDRDGNPRVTPEVTRDVCLLARMMASNLYCSQIEDLMFELSMWRCSDELRMRADELHRSTKKDAKHYIEFWKKVPPNEPYRVILSDVRDKLYNTRERSRELLSSGHSDIPEEATLTTVEQLLEPLELCYRSLCACGDRVIADGSLLDFLRQVSTFGLSLVRLDIRQESDRHTDVLDAITTYLGIGSYREWPEERRQEWLLSELNGKRPLFGPDLPKTEEIADVLDTFHVIAELPADNFGAYIISMATAPSDVLAVELLQRECHVKTPLRVVPLFEKLADLEAAPAALARLFSIDWYRQRINGKQEVMIGYSDSGKDAGRLSAAWQLYKAQEELIKVAKDFGVKLTMFHGRGGTVGRGGGPTHLAILSQPPDTIHGSLRVTVQGEVIEQSFGEEHLSFRTLQRFTAATLEHGMHPPNAPKPEWRTLLDEMAVVATEEYRSIVFQEPRFVEYFRLATPETEYGRMNIGSRPSKRKPSGGIESLRAIPWIFAWTQTRFHLPVWLGFGGAFKHVLQKDIRNLHMLQEMYNEWPFFRVTIDLVEMVFAKGNPGIAALYDKLLVSEELRPLGEKLRANYEETQKLLLQVAGHRDLLEGDPYLKQRLRLRDAYITTLNVCQAYTLKRIRDPDYHVALRPHLSKEIMDPTKAASELVKLNPGSEYAPGLEDTLILTMKGIAAGLQNTG

SEQ ID NO: 30274 - protein, 415 aa, Ehrlichia ruminantium str. Gardel
MTKILVKKFGGTSLQNIKCINQVTEIIKQDVCSNHKVVVIVSAMGKFTDNIISQIKKISDVKSYNELSEYDLIISSGEQISCGMLSLALQKLGIKAQSWLGWQLPIVTTDDHTKARIMEINTSALQDFLANNDVAIIAGFQGMHKENRVTTLGRGGSDTSAVAIAAALGIDLCYIYTDVDGIYTSDPNIVPKARKLDYIAYDEMIEMASLGAKVLQVRSVELAMKYNIKLHVLSTFNSIKGTILCKKGEIKMESQLITGITYNSNTASITLKKVRALFGITTLFSIIADNGINVDMIIQNMDNNANDITFTIPEEDLSITETLLIKTKDKLMYEELIINPDVAKVSVIGVGMISHPGIAYKMFDTLTSNNITILAVTTSEIKISVLVLRKDGQLATQYLHSSFKLDSQSNLHTTS

SEQ ID NO: 30275 - protein, 476 aa, Silicibacter sp. TM1040
MSNLKEPSFRESVDLMFNRAVALMDLPPGLEEKIRVCNATYTVRFGVRLRGQIHTFTGYRSVHSEHMEPVKGGIRYAMGVNQDEVEALAALMTYKCALVEAPFGGSKGGLRIDPRQYDEHELELITRRFAYELAKRDLINPSQNVPAPDMGTGEREMAWMADQYARMNTTDINARACVTGKPLNAGGIAGRVEATGRGVQYALQEFFRYEEDKAKAGLSGTLDGKRVIVQGLGNVGYHAAKFLSEEDGCKIVAVIERDGGLYDENGLDIEDLRAWIEKHDGVDGYPSGRYIKNGAKYLEEDCDILIPAALEGVINLSNAENVKAKLIIEAANGPVTAGADEILRKKGTVIIPDMYANAGGVTVSYFEWVKNLSHIRFGRMQRRQEEARHQLVVDQLEMLSESMGKTWSLDPKFKEKYLRGAGELELVRSGLDDTMRIAYQSMRQVWHERDDVSDLRTAAYLVSIDKVASSYRAKGL

SEQ ID NO: 30276 - protein, 363 aa, Yersinia pestis
MTKTYHIAVLPGDGIGPEVMAQASKVLDAVRQRFGLKISTSVYDVGGAAIDRHGSPLPAATVAGCEQADAILFGSVGGPKWEHLPPAEQPERGALLPLRKHFKLFSNLRPARLYQGLEDFCPLRSDIAARGFDILCVRELTGGIYFGQPKGREGQGMHERAFDTEVYHRFEIERIARIAFESARKRRSKVTSIDKANVLQSSILWREVVNGIAADYPDVALSHMYIDNATMQLIKDPSQFDVLLCSNLFGDILSDECAMITGSMGMLPSASLNEQGFGLYEPAGGSAPDIAGKNIANPIAQILSLTLLLRFSLGKDDAADAIERAINQALEQGYRTADLAGDGHAIGTHEMGDIIAKFVVEGV

SEQ ID NO: 30277 - protein, 255 aa, Brassica napus
MYADTGLGFRFMQGCSPEIHQFEDLFKPYKLSDQTISLVEACEYGFGEESDLLKAPEPIIEEPMLAVDPLSQEIVELSDLGSLQSDQQLIEKAFYECEQELLVKSAMESPLLSEVLDRKNVSQAAEMDSSSVVVSDVPVPKSVSSGSLTSMDIAQHEEAVIQRFFPPVDNGMRRAFSESDIQTLGTRNAGQVQSQLDRIIVSCTSEDRREKLSRYRDKKSRRNFGRKIKYACRKTLADSQPRIRGRFAKTEEMQK

SEQ ID NO: 30278 - protein, 669 aa, Debaryomyces hansenii CBS767
MSHNSSPESNTTSDDKKQQLRRRHGSHDTPSENDSRRSSRSSTKSNTKPKTHRKKSFVNFAPLNTPLHNRLETMGVIWHCLSIPFFVSLFLLAISLGWIIWIFVILPYFIWWYFFDLHTPTNGKIVYRVKDWMKNIIIWEWFVNYFPISVHKACEFEPTFTQMLVDDNEGNDDEEDLISEDSRTLLDKLFKTLGLRKRLNDSDSHNVLNTTSSDRKFDKALKYKKESTGPRYIFGYHPHGVISMGVMGAFATNVIRNEPYQPPFSFLKSFFHDPSKYTRLLPGIGNIFLLTLTTQFTLPFYRDYLMSLGLTSASYKNIKSLINNGDNSVCLVVGGAQESLLNTMVSPRSRIGNGYKKDETDESGDESEPMVKEYNPKEVQHYSMKEQMDKISDEKKQESSESDSNLDTEKGQKKLENEKLIKTETEDADQPEENKNKSFNDHNGTETENSGQGKEKESQRDDPSSPRQIQLVLNKRKGFVKLAIELGNVCLVPTFGFGEADIFRIANPKPGSLGSRFQEWMKSTFQFTVPFFSARGVFIYDFGFLPFRNPIDICMGEPIYVLSGLIADYKLKHPGFDSDEEVEQKNKQKKEYEKEDETDSKKKDKKDSKKKGKKDFEDKKDSKKREKKIKIPSEILNHYHKLYVDGLKKVYEENKGKFGYEDVELIIIE

SEQ ID NO: 30279 - protein, 942 aa, Saccharophagus degradans 2-40
MKSQSVQTELFRLITVPVFAACFILASTFFYLQKSHIEDQFSNNKHLATELLNSVVFSNKASTNPFAEAANALLATGDYRSIVVSSATGQQIASYGLPLRTHSYQTQLGVESQWTHEDSLIYSFPLKKSNLQSSTPLWVIIAIDKRSWAISEYQGTITILLAGSLCLFLTFYFARRFRDALATPLQKIETGLRDFLKGNFEKSITIEPSSVFKDLASNINRLGALQKSANDELQLNIDQSTHELRETLETVEIQNIELDIARKSALQASRVKSEFLANTSHEIRTPLNGILGFSELLRKTELNNQQVDYLTTIEESAKGLLTIINDILDFSRLEIGTLTLEYKPVKIRQLIEDTLKLQTPAANEKNIRMLTIIDHDVPENLLGDPLRLKQVLSNLVSNAIKFTDVGYILLGVSKDQSSENQFTLKFRVTDSGIGLSQDQQERLFDPFTQLDSSESRLHGGTGLGLAIAKGLVDRMNGTIGVESTLGKGATFWFTSTLGRSPSASAKQTYLAGTLRGVHALVFDHSNMGRMEITHYLTGWGAKVCETGEMEDIEPQISFFSNSEPVDIAIIDSMIDIKTFDRLRICEHVTQLNHRFNIPVIILAPSSIQRILEPHLAGTNSLFINRPLFCNKLHQTICEQLEIVATENIESRTYLHQHEPLEQQQVNILAVDDNPANLKLVTELLKGLNINVTPVESGEQAIAQIKDSHFDLILMDIQMPSMDGIETTGHIRELETSGPRTPIIALTAHAVSEQKSRLLLAGMDDCLSKPVSESELRHVIERWTNVTIATKIAPTNPAPVASALIEHSPNADKTGENQPATDSQAAAIVDRALGLSLTNQNPSLAGDMLSMLIETLPDVLHKSRTQYENKQFDELQETVHKLHGGCCYCGVPRLKAISEQIDKNLQKNKYNNLANEIQLLEAEIKNLLQWAEEHDIDVLFSDD

SEQ ID NO: 30280 - protein, 448 aa, Clostridium aminovalericum
MKIVVIGCTHAGTAAVKTILKENPEAEITIFERNDNISFLSCGIALYVGGVVKDPAGLFYSNPEELSKMGANVKIKHNVKSIDTKSKKVIAEDMNTGEEIEVSYDKLVNTTGSWPIIPPIPGIESKNILLCKNYDQANVIIRQTKDAKKIVIVGGGYIGIELVEAFQKSGKQVTLIDGLDRILNKYLDKEFTDILEDDLKKNGINLALDQCVKSFKANENGEVTSVETTKGEYEADMVILCVGFRPNNELLKGKVDMLPNDAIIVDEYMRTSDPDIFAAGDSCAVHYNPNGNYAYIPLATNAVRMGMLIGKNISTPKVKYRGTQSTSGLNLFGYNIGSTGVTVSGAPQIGLNVRSVIVKDNYRPEFMPTNEEIIMQLVYEVGTNRIVGGQVMSKYDITQSANTLSLAIQNKMTIEDLAYVDFFFQPHFDRPWNYLNILGLAALEQEGL

SEQ ID NO: 30281 - protein, 358 aa, Arabidopsis thaliana
ILDAMWQMNLGSDDTMGVDGSYPERHGEPDCAYYIRTGLCRFGSTCRFNHPHDRKLVIATARIKGEYPERIGQPECEFYLKTGTCKFGVTCKFHHPRNKAGIDGSVSVNVLSYPLRPNEDDCSYFLRIGQCKFGGTCKFNHPQTQSTNLMVSVRGSPVYSALQSLTGQPSYSWSRTSFVANPPRLQDPSGFASGSQGGLFSSGFHSGNSVPLGFYALPRENVFPERPGQPECQFYMKTGDCKFGTVCKFHHPRDRQTPPPDCVLSSVGLPLRPGEPLCVFYSRYGICKFGPSCKFDHPMRVFTYNNNTASPSPSSSLHQETAITTELRNLLVSSSVEAKPTSLPETTSAKDTIVDAQH

SEQ ID NO: 30282 - protein, 1518 aa, Saccharomyces cerevisiae
MTGHVSKTSHVPKGRPSSLAKKAAKRAMAKVNSNPKRASGHLERVVQSVNDATKRLSQPDSTVSVATKSSKRKSRDTVGPWKLGKTLGKGSSGRVRLAKNMETGQLAAIKIVPKKKAFVHCSNNGTVPNSYSSSMVTSNVSSPSIASREHSNHSQTNPYGIEREIVIMKLISHTNVMALFEVWENKSELYLVLEYVDGGELFDYLVSKGKLPEREAIHYFKQIVEGVSYCHSFNICHRDLKPENLLLDKKNRRIKIADFGMAALELPNKLLKTSCGSPHYASPEIVMGRPYHGGPSDVWSCGIVLFALLTGHLPFNDDNIKKLLLKVQSGKYQMPSNLSSEARDLISKILVIDPEKRITTQEILKHPLIKKYDDLPVNKVLRKMRKDNMARGKSNSDLHLLNNVSPSIVTLHSKGEIDESILRSLQILWHGVSRELITAKLLQKPMSEEKLFYSLLLQYKQRHSISLSSSSENKKSATESSVNEPRIEYASKTANNTGLRSENNDVKTLHSLEIHSEDTSTVNQNNAITGVNTEINAPVLAQKSQFSINTLSQPESDKAEAEAVTLPPAIPIFNASSSRIFRNSYTSISSRSRRSLRLSNSRLSLSASTSRETVHDNEMPLPQLPKSPSRYSLSRRAIHASPSTKSIHKSLSRKNIAATVAARRTLQNSASKRSLYSLQSISKRSLNLNDLLVFDDPLPSKKPASENVNKSEPHSLESDSDFEILCDQILFGNALDRILEEEEDNEKERDTQRQRQNDTKSSADTFTISGVSTNKENEGPEYPTKIEKNQFNMSYKPSENMSGLSSFPIFEKENTLSSSYLEEQKPKRAALSDITNSFNKMNKQEGMRIEKKIQREQLQKKNDRPSPLKPIQHQELRVNSLPNDQGKPSLSLDPRRNISQPVNSKVESLLQGLKFKKEPASHWTHERGSLFMSEHVEDEKPVKASDVSIESSYVPLTTVATSSRDPSVLAESSTIQKPMLSLPSSFLNTSMTFKNLSQILADDGDDKHLSVPQNQSRSVAMSHPLRKQSAKISLTPRSNLNANLSVKRNQGSPGSYLSNDLDGISDMTFAMEIPTNTFTAQAIQLMNNDTDNNKINTSPKASSFTKEKVIKSAAYISKEKEPDNSDTNYIPDYTIPNTYDEKAINIFEDAPSDEGSLNTSSSESDSRASVHRKAVSIDTMATTNVLTPATNVRVSLYWNNNSSGIPRETTEEILSKLRLSPENPSNTHMQKRFSSTRGSRDSNALGISQSLQSMFKDLEEDQDGHTSQADILESSMSYSKRRPSEESVNPKQRVTMLFDEEEEESKKVGGGKIKEEHTKLDNKISEESSQLVLPVVEKKENANNTENNYSKIPKPSTIKVTKDTAMESNTQTHTKKPILKSVQNVEVEEAPSSDKKNWFVKLFQNFSSHNNATKASKNHVTNISFDDAHMLTLNEFNKNSIDYQLKNLDHKFGRKVVEYDCKFVKGNFKFKIKITSTPNASSVITVKKRSKHSNTSSNKAFEKFNDDVERVIRNAGRS

SEQ ID NO: 30283 - protein, 904 aa, Silicibacter sp. TM1040
MSDLDASWILVCALLVLLLQAGFLCLEAGTVRAKNSANVALKNLSDVCIVSTCFWLVGFGLMFGESFNGLFGTTQFWLALDNDSGHAASIFLFQMAFAASAATIVSGAVAERERFLGYMVVSVALSALVYPVVGHWIWNQAGWLRQMGFVDFAGATVVHSVGGWTALVTIIILGPRLGRYGPKKRRFDEYSISLVTLGGLLLWVGWGAFNGGSAMAFGTGVGPIIARTMLLAAGAGVASIAIGLGLFRHVRAELLVNGFLGGLVAGTAGVHLMTGTVAFGIGALGAVTVIIARDILDALKIDDVVGAVPVHLAAGLIGTLSIAFTAPVDLLPAGSRLAQLGIQALGITAVGGWVVCSMAPLILLLRARGLLRVHPKDEVRGLNLTENNQRNALMDLLAEMKRHQRSGSFSRRVRIDRSTEYGVLAYRYNRVLDRVEAEINARVDSIRKERMSRLLAEEAFESMREAQEENAWSARHDKLTGLGNRKYLEEVAVETSTGPLGATLLIAIDLDRFKEINDTYGHEAGDVVLEHTAQRLSEKIRTGRDFAFRIGGDEFVVLMEFAGTQDDAFEYCSDLLFELLQPVRYKATDLQVGASIGFALCKPPETLGAALRRADLALYASKADGRSCVNAYSASIGSAHDEKMNLIRDFKQAFANNEIEVTLQPQIDGKTMEIAGCEALARWHHPVRGIVSPDVFVPVAKEVNMLADLDRRILDLALAAYWNFASHGIALPSLSVNVSAERLGHPDLIKELQQREDLPPDGLAFELLETVFLDQLTENYANQIAALKAMGIAIEIDDFGTGHASIAGVLALKPDRLKIDRMFTSGIDEKPARRDLMRGLIEMAASAGAETVVEGVETEAQAQVLSELGADVLQGFAFARPMDQERFLLWAQDWNAARQMPKTG

SEQ ID NO: 30284 - protein, 325 aa, Colwellia psychrerythraea 34H
MAQINLLHAINSALDIAMADDKSTVCFGEDVGHFGGVFRATSGLQEKYGKARCFNTPLVEQGIIGFANGLAAQGSVAIAEIQFADYIFPAFDQIVNEAAKFRYRSGNEFNVGKLTIRSPYGGGIAGGLYHSQSPEAYFAHTPGLKVVIPRNPYQAKGLLLASIRDDNPVIFFEPKRLYRASVGEVPEEDYQLPLGKAEVVQTGTDITLLAWGAQMEIIEKAAQMASNDGISCEVVDLRTILPWDIETISNSVMKTGRLLISQEAPLTAGFASEIAATIQSECFLHLESPIARVCGLDTPYPLALEKEYVSDHLKVYEAIIKSVNF

SEQ ID NO: 30285 - protein, 574 aa, Caulobacter crescentus CB15
MARPLLDDSIDLIASTGRQARPARLGMAVLVAGFLGFNVSAAIAIVWFAAAMVAEVYGLGVTRLSRRLNLSPVLRRLGYVTVVIVMVGVWTALTLVLWTSGNPALQWAAICLAAGQLIHAQSVTFRAPVLFAIDVGMPSTSLIVMPILTGGFAPVQIATMMTAVALMLLYTFTSATANNRRIAALEAAEAQALKASEAKSAFLAMISHEIRTPMNGVLAMTDALSRADLGPDQARQTALLKRSGEDLMTLLNDVLDISRIEAGKLEIECQPFDLPELLGDLRALWTPAATDKGLDLVLTIAPGLDAYRLGDPTRLRQILGNLVSNAVKFTRSGGVALSARPGEAPGAVVFDVADTGIGMTPEQQGRLFQSFSQADASIARRFGGSGLGLSICSQLATLMDGAITVDSDLGSGSTFRLTLPLPVTERPAAPAPAEPAADTAETPATPDSLAGLTVLVADDHPVNQAVARAILEAVGARVAVADNGEAALASLKSAPADLVLMDLHMPGLGGRETVRRIRRGEGGDPAVPIIALTGEALGEDPAAWRAEGFDAVQQKPVVARDLLAAAARLTARTA

SEQ ID NO: 30286 - protein, 357 aa, Clostridium acetobutylicum
MKEYKVAVIPGDGIGVEIVGEALKVLEKVGAKYDTKFNFTEVKAGGCAIDEFGVPLPNETLEICKNSDAVLLGAVGGPKWDTLPGEKRPEKALMGLRGGLGLYANLRPAKVYDILKSASPLKEEIINKGVDLLVVRELTGGIYFGERGRDIQNGINSAYDTERYNVEEIKRIAHVAFKAALKRNKKVTSVDKANILESSRLWRETVTEVAKEYPEVELNYLYVDNAAMQLVREPSQFDVIVTSNIFGDILTDEASMVTGSIGMLPSASLRNDTFGMYEPIHGSAPDIAGQDLANPLAQILSVAMMLEYSFNMTEAARDVEDAVEKVLNSGYRTGDIYTEGSKKVGTKEMGKLVLAEL

SEQ ID NO: 30287 - protein, 140 aa, Bradyrhizobium sp. BTAi1
MLTAEEIACVRSSFDMVFANATDMTTTFYQRLFELAPECRSMFPDNMDVLKRDFIATLAVLVGSLDRMTGLLSSTDILGRNHARYGVRPEHYPLVGEALLWSLAKGLGPQWTAEVEQAWRKVYEIISQRMIAISAGPRLP

SEQ ID NO: 30288 - protein, 236 aa, Burkholderia sp. 383
MSLMSISSAPADAFADLPLLDSEPVPPRIAAALEAMRAGRAVVLQDDHDRENEADLIVAAERITPETMALLIRECSGIVCLCLTDDTVRALELPPMVQTNESRNGTAFTVSIEAREGVHTGVSAADRVTTIRAAIAEGAKPHDIVRPGHVFPLRAQPGGVLARRGHTEGTVDLSILAGLKPAGVLCELMNPDGTMTRGDDVERFAQQHGLPMLTIAELVEFREALAAARERCCEPA

SEQ ID NO: 30289 - protein, 333 aa, Nitrosomonas europaea ATCC 19718
MTIRIGINGFGRIGRMVFRCSIEEFDDIEVVAINDLLEPDYLAYMLTHDSVHGRFRGDVSVSGNNLIVNGKQIRLTAIKDPTELKWDEVGADIVVESTGLFLTKELAQKHIQAGAKKVVLSAPSKDDTPMYVYGVNDKAYGGEAIISNASCTTNCLAPIAKVLNDTWGIKRGLMTTVHAATATQKTVDGPSNKDWRGGRGILENIIPSSTGAAKAVGVVIPELNKKLTGMAFRVPTSDVSVVDLTVELEKDASYEDICNAMKEASAGSMKGILGYTDQKVVSTDFRGETCTSVFDAEAGIQLDKNFVKVVSWYDNEWGYSCKLLEMVRVIASK

SEQ ID NO: 30290 - protein, 156 aa, Triticum aestivum
MATDPSKYKLNHSMIRIKDPKRSVQFYEFLGMKQINQIKNPDAKFDLYFLAYDSPKAVSHGNHWTDREGIVELTHNYGTEDDPNYKISNGNTEPHKGFGHLCISVDNLQAACQRLEDAGYKFQKKLTDGRMRHIAFVLDPDGYWVEVIGQKPLEET

SEQ ID NO: 30291 - protein, 226 aa, Brassica napus
  misc_feature (18)..(18): Xaa can be any naturally occurring amino acid
  misc_feature (46)..(46): Xaa can be any naturally occurring amino acid
  misc_feature (70)..(70): Xaa can be any naturally occurring amino acid
  misc_feature (170)..(170): Xaa can be any naturally occurring amino acid
SILPKYKLGKTLCIGSFXAKVKIGEHLLTGHKVAIKILNRRKIKTXQIEDKVRREIKILRLFIHPHVIHXYEVIESPGDIYLVMESVKSAELFDYIVEKGRLQEDEGRNFFQQIISGVEYCHRNMVVRRDLKPENLLLNSMCNIKIADFWLSNVMRDGHFLKTSCGSPNXSCSQIISGKLYSGPEVDVLSCGVIFYALLCGTLPFDDENIPNLFKKIKVLYFDSAQ

SEQ ID NO: 30292 - protein, 261 aa, Acinetobacter sp. ADP1
MIPDQDNFVEIDFSIEQIAIVKINRPASKNALNTEVRKQLAQAFTELSFNDQINAIVLTGGEDVFAAGADLKEMATASSTDMLLRHTERYWNAIAQCPKPVIAAVNGYALGGGCELAMHTDIIIAGKSATFGQPEIKVGLMPGAGGTQRLFRAVGKFHAMRMIMTGVMVPAEEAYLIGLVSQVTEDSQTIPTAIKMAQSLAKMPPIALQQIKEVALMSEDVPLNAGLTLERKSFQLLFSTEDKNEGINAFIEKRKPSYHGK

SEQ ID NO: 30293 - protein, 372 aa, Zea mays
  misc_feature (235)..(235): Xaa can be any naturally occurring amino acid
MLGVARRRLGSGCVLAQLAQALRPAAVPARTYSAAAKEITVREALNTALDEEMSADPSVFLMGEEVGEYQGAYKISKGLLDKYGPDRVLDTPITEAGFTGIGVGAAYHGLRPIVEFMTFNFSMQAIDHIINSAAKSNYMSAGQISVPIVFRGPNGAAAGVGAQHSQCYAAWYAHVPGLKVLAPYSAEDARGLLKAAIRDPDPVVFLENELLYGESFPVSAEVLDSSFCLPIGKAXERQGKDVTITAFSKMVGYALQAADILAKEGISAEVINLRSIRPLDRATINASVRKTNRLVTVEEGFPQHGIGAEICMSVVEGSFEYLDAPVERIAGADVPMPYAANLERMAVPQVDDIVRAAKRACYRAAVPMAATA

SEQ ID NO: 30294 - protein, 427 aa, Novosphingobium aromaticivorans DSM 12444
MPIAIKMPALSPTMEEGTLAKWLVKVGDKVSSGDIMAEIETDKATMEFEAVDEGTIVSIDVAEGSEGVKVGTVIATLAGEDEDASAPAPKAVAPAAAPVPVPAPKAEPAPAAVSTPAPAAASASKGDRVIATPLAKRIAADKGIDLKGVAGSGPNGRIIRADVEGAKPAAAAPVSTVAPAVASAAAPARAPAAVPDFGIPYEAQKLNNVRKTIARRLTEAKQTIPHIYLTVDIRLDALLKLRGDLNKALEAQGVKLSVNDLIIKALAKALMQVPKCNVSFAGDELRSFKRADISVAVAAPSGLITPIIVDAGSKSVSAIATEMKALANKAREGKLQPHEYQGGTASLSNLGMFGIKNFDAVINPPQAMIMAVGAGEQRPYVIDGALGIATVMSATGSFDHRAIDGADGAELMQAFKNLIENPLGLVA

SEQ ID NO: 30295 - protein, 515 aa, Novosphingobium aromaticivorans DSM 12444
MNQPAIKHALNVKRADDFAQWYQAVIAEAELAEESGVRGCMVIKPWGYGIWERIQKLMDAEIKEAGVENCYFPLFIPLSYFTKEAEHVEGFAKEMAVVTHHRLISDGKGGLTPDPEAKLEEPLVVRPTSETVIGAAMSRWIQSWRDLPLLTNQWANVVRWEMRTRMFLRTSEFLWQEGHTAHVDEADAMKETLRALEMYRAFAEGPLAMPVIAGPKPENERFPGAVETFSIEAMMQDGKALQAGTSHYLGTTFAKAAGIQYQNKEGQQALAHTTSWGVSTRLIGGVIMTHGDDDGLRVPPQVAPQQIVILPMLRDNEGDDALLAYCEEIRASLVKLSVFGERIRVLLDKRPGKATQKRWAWVKKGMPLILEIGGRDAEGGLVSVLRRDRLWRQDAKPNFVGQAKDDFLASAATELESIQAALYDEARARRDAQIVRDVTDLEGLKGYFAEGNKYPGWVEMGWAKPTGEALDKVVEQLKALKLTIRNTPMDAEKPVGACPFTGEPAVEKILIARSY

SEQ ID NO: 30296 - protein, 406 aa, Bordetella bronchiseptica RB50
MAITDVLVPQLSESVSEATLLTWKKQAGAAVEADEILIEIETDKVVLEVPAPSSGVLSEIVMGDGSTVTSGEVIARIDTAAKAAAAPAAAAEAPAAAAAAAPAAAAPAAASSTASGVASPAAAKILAEKGVDAASVAGTGRDGRVTKGDALAAGNAPAAKAAAPVAPPTLSLDGRPEQRVPMSRLRARIAERLLQSQAENAILTTFNEVNMQAVMDLRARYKDKFEKEHGVKLGFMSFFVKAAVAALKKYPVLNASVDGKDIIYHGYFDIGIAVGTPRGLVVPILRNADQLTIAEIEKTIADFGKRAADGKLGIEEMTGGTFSISNGGVFGSMLSTPIINPPQAAILGIHATKERPVVENGQIVIRPINYLAMSYDHRIIDGREAVLGLVAMKEALEDPQRLLLDL

SEQ ID NO: 30297 - protein, 154 aa, Arabidopsis thaliana
  misc_feature (137)..(137): Xaa can be any naturally occurring amino acid
  misc_feature (149)..(149): Xaa can be any naturally occurring amino acid
MALCATTQRTIRIAATLRRVARPFATDAVVESDYKRGEIGKVSGIPEEHLSREVIIYSPARTATQSGSGKLGKWKIDFVSTLKWENPLMGWTSTGDPYANVGDSALAFDFEEAAKSFAERHGWDYKVKKPNTPLLKXKSYSDNFKWKGXSQPEN

SEQ ID NO: 30298 - protein, 182 aa, Desulfotalea psychrophila LSv54
MNTLKNQTLPLRIIMKRDFYQFSATNLQGQKIAMKEYRGKVMLVVNTASKCALSSQLRGLEILYKKYAPLGFVVLGFPCNQFTPQESRDAQNIAEEYLLNYGASFPLFTKTEVVGKGAHPLFSYLENRLEGIMGPDIKWNFTKFLIDHRGDPVKRFAPITAPAIIAPDIEILLSAQSTAGEQ

SEQ ID NO: 30299 - protein, 210 aa, Neorickettsia sennetsu str. Miyayama
MFSTVEEVIHQLKERNKPFVLVDSSDRENEGDIVVPVQILTSEIMNFVVTHCRGLPCVCVTKSLCEKLGLDLIKRSDSCESSNVARFVTTIEAKEGVSTGISVRDRVRTMRLLANDNVDKDSFVSPGHVFPLMIEEGGLMVRSGHTEGAATFARLAGFKSESMLCEILDEAGDAARLPYLTDFARKYDLCLTSIDLLITYLKEKGTSILF

SEQ ID NO: 30300 - protein, 566 aa, Citrus x paradisi
MSPSLVANADLSPVTSGTVKGRVASVYSELQTSRIDHALPLPSVLKNPFKIVDGPASSAAGNPDEIAKLFPNLFGQPSALLVPNGADAVRSDEKLKIGVVLSGGQAPGGHNVISGIYDYLQDRAKGSVLYGFRGGPAGIMKCKYVELTSNYIYPYRNQGGFDMICSGRDKIETPEQFKQATETAVKLDLDGLVVIGGDDSNTNACLLAEHFRSKNLKTLVMGCPKTIDGDLKCKEVPASFGFDTACKIYAEMIGNVMIDARSTGKYYHFVRLMGRAASHITLECALQTHPNITIIGEEVAAKKQTLKNVTDYIVDIICKRAELGYNYGVILIPEGLIDFIPEVQQLIAELNEILAHEVVDEGGQWKKKLTKQSLQLFEFLPQAIQEQLMLERDPHGNVQVAKIETEKMLIQMVETELENRKQEGVNKGQFKGQSHFFGYEGRCGLPTNFDATYCYALGYGAGALLHSGKTGLISSVGNLAAPVEEWTVSGTALTALMDVERRHGKFKPVIKKAMVELDGTPFKKFVSMRDEWALNNRYISPGPIQFTGPTSGDVNHTLLLELGAQV

SEQ ID NO: 30301 - protein, 181 aa, Debaryomyces hansenii CBS767
MRSLTEEETKIVFEKLANYIGRNISFLIDNPTNPHVFRLQKDRVYYVSEQIANFATSVSRHQLMSIGTCFGKFTKTGKFRLHITALPYLAQYAKFKVWIKTNGEMPFLYGNHVLKAHIGRMSDDIPEHAGVIVYSMNDVPLGFGVSAKSTNEARALQPTGIVAFRQGDIGEYLREEDTLFA

SEQ ID NO: 30302 - protein, 414 aa, Chondrus crispus
MAFVAPVATVRATTKSSVCQVQGRSSFAQFSGMKKVNQSSRLQPAQSGSAFGGYSDANDAFYTRVSGIVAATFGPTMKVRVAINGFGRIGRNFIRCWAGRSDSNMEVVCINDTSGVKTASHLLKYDSILGTFDADVSAGEDTISVNGKTIKIVSNRNPLQLPWKEMNIDIVVEATGVFVDAPGAGKHIEAGAKKVLITAPGKGDGIGTFVVGVNEKDYSHDKYDIVSNASCTTNCMAPFMKVLDDEFGVVRGMMTTTHSYTGDQRLLDAGHRDLRRARSAALNIVPTTTGAAKAVALVVPSLKGKLNGIALRVPTPNVSVCDVVMQVNKKTFKEEVNGALLKASEGAMKGIIKYSDEPLVSCDHRGTDESTIIDSSLTMVMGDDMIKVVAWYDNEWGYSQRVVDLGEVMARQWK

SEQ ID NO: 30303 - protein, 168 aa, Avena sterilis subsp. ludoviciana
VMASSATSVAPFQGLKSTAGLPVSRRSNAGLGSVSNGGRIRCMQVWPIEGIKKFETLSYLPPLTEEALLKQIDFLIRSKWVPCLEFSQGGFIFREHGSTPGYYDGRYWTMWKLPMFGCTDASQVIKEVEEVKKEYPDAYVRIIGFDNIRQVQCVSFIAFKPPGCEESG

SEQ ID NO: 30304 - protein, 272 aa, Zea mays
  misc_feature (27)..(27): Xaa can be any naturally occurring amino acid
MAAQSMLMSTSVNGGRALPSLQAVRPXAPYPRLPLPSSSSSSGYRHSKSVSVKTLALFGKSKVKTAPAKKAAAPKPKPKVEDGIFGTSGGIGFTKENELFVGRVAMLGFAASLLGEAITGKGILAQLNLETGIPIYEAEPLLLFFILFTLLGAIGALGDRGRFVDEEVTGLDKAVIQPGKGFRGALGLSEGGPLFGFTKSNELFVGRMAQLGVAFSIIGEIITGKGALAQLNIETGVPINEIEPLVIFNVLFFFIAAINPGNGRFIIGEEEE

SEQ ID NO: 30305 - protein, 427 aa, Torulaspora delbrueckii
MATHEEFIRTQVFGTVFEITNRYTDLNPVGMGAFGLVCSATDTLAQQPVAIKKIMKPFSTAVLAKRTYRELKLLKHLRHENLICLQDIFLSPLEDIYFVTELQGTDLHRLLQTRPLEKQFVQYFLYQILRGLKYVHSAGVIHRDLKPSNILINENCDLKICDFGLARIQDPQMTGYVSTRYYRAPEIMLTWQKYDVEVDIWSAGCIFAEMTEGKPLFPGKDHVHQFSIITDLLGSPPEDVINTICSENTLKFVTSLPHRDPVPFRERFKTVEPEAVDLLEKMLVFDPKKRITAADALVHPYLAPYHDPTDEPVADAKFDWNFNDADLPVDTWRVMMYSEILDFHKIGGGDGQIDTSATFDDQVAAATAAAAHAAAVAQAQAQAHSNSSNSNSSSNVNSKSKAARDSANDAITNYGNQAVHYANEFQQ

SEQ ID NO: 30306 - protein, 379 aa, Desulfotalea psychrophila LSv54
MRMKDIFEFADELGPLKVIHVYEPSVNLRAVLVVDNIARGPSLGGVRMATDVSVEECVRLARAMTYKNSAAGLPHGGGKAVLYGDPKMAKVEKEKMIRALAKVLRNEDSYIFAPDMGTDEECMAWVQDEIGRVVGLPREIGGIPLDEIGATGFGLSHAVDVALNYCDFQLEGARVVVQGFGAVGKHAARYLSQRGAVLVAVADSRGAIYNPDGLDVQQLIALKAAGGFVGDYPEARKMTGDDLLDVACDIWIPAARPDVIHEANVHRLNTRLVVEGANIPLTHGAERILHERGILCLPDFIANAGGVICAAMEYQGASQVAALAMIEEKLRANTEQVLAMVKDRDMLPREAAMEMALGRLKKAMSYRRFSLFSSGPKFI

SEQ ID NO: 30307 - protein, 547 aa, Arabidopsis thaliana
MADVMEQNLLQTAVLNRTSFHFQPQRNWLNAPMYYKGFYHLFYQNNPLAPEFSRTRIIWGHSVSQDMVNWIQLEPALVPSESFDINSCWSGSATILPDGRPVILYTGLDVNNKQQVTVVAEPKDVSDPLLREWVKPKYNPVMVPPSNVPFNCFRDPTEAWKGQDGKWRVLIGAKEKDTEKGMAILYRSDDFVQWTKYPVPLLESEGTGMWECPDFFPVSITGKEGVDTSVNNASVRHVLKASFGGNDCYVIGKYSSETEDFSADYEFTNTSADLRYDHGTFYASKAFFDSVKNRRINWGWVIETDSKEDDFKKGWAGLMTLPREIWMDTSGKKLMQWPIEEINNLRTKSVSLDDCYEFKTGSTFEISGITAAQADVEVTFNLPFLENNPEILDADQVDDATLFDRDSSVGCVYGPFGLLALASSDLSEQTAIFFKVIRRGNGYAVVMCSSEKRSSLRDNIKKSSHGAFLDIDPRHEKISLRCLIDHSIIESYGVGGKTVITSRVYPKLAIGEAAKLYVFNDGENGVIMTSLEAWSMRNAQINSNPTY

SEQ ID NO: 30308 - protein, 481 aa, Rubrobacter xylanophilus DSM 9941
MAEPFVGGEYLTLSGLDRLPVVDPATGEEVDSVPVCGEAEVDAAVRGAAGAFPGWSGTPASRRGELLARAAEAVLGARDELAGLLTAEQGKPLREARLEIRRFVHTLEHYAGLAKNIRGGYVPDLDEGAYGLILRRPVGVVGAIVPWNFPTTLLANKLGPALVAGNVVVAKPAETTPLTTLRIAEIMHGAGLPAGVFNVVTGDGPTTGQALAGHPSVRKVAFTGSTPVGKKLAALAAGDLKRVTLELGGSDPMIVCDDADLDRAASAASVGRFFNCGQACLAVKRLYVFESVAEEFVEKLVGKAKRLRVGPGRAEGTIIGPLHTPEGRELLEGQVRDAVESGARVLAGGRRPEGEVFERGNFYEPTLLLEPSHESRVATEEVFGPALPIWRVGDLEEAIERANGSIYGLGSSVWTADLDRATEAAERIEAGYTWINSPQVIYDELPFGGWKQSGYGKEHGMEAIEYYTETKSVVVRRAYQG

SEQ ID NO: 30309 - protein, 326 aa, Metschnikowia pulcherrima
SIVGRPRHQGIMVGMGQKDSYVGDEAQSKRGILTLRYPIEHGIVNNWDDMEKIWHHTFYNELRVAPEEHPVLLTEAPMNPKSNREKMTQIMFETFNVPAFYVSIQAVLSLYSSGRTTGIVLDSGDGVTHLVPIYAGFSMPHGILRLNLAGRDLTDYLMKILSERGYTFSTTAEREIVRDIKEKLCYVALDFEQEMQTSSQSSAIEKSYELPDGQVITIGNERFRAAEALFRPTDLGLEAVGIDQTTYNSIIKCDVDVRKELYGNIVMSGGTTLFPGIAERMQKEITALAPSSMKVKIIAPPERKYSVWIGGSILASLSTFQQMWIS

SEQ ID NO: 30310 - protein, 129 aa, Burkholderia sp. 383
MRLLHTMLRVGDLDRSIKFYTELLGMKVLRRDDYPEGKFTLAFVGYGDESDNTVIELTHNWDTPAYDLGNGFGHLALEVDDAYAACDKIKAQGGKVTREAGPMKHGTTVIAFVEDPDGYKIEFIQKKAH

SEQ ID NO: 30311 - protein, 326 aa, Pichia fermentans
SIVGRPRHQGIMVGMGQKDSYVGDEAQSKRGILTLRYPIEHGIVTNWDDMEKIWHHTFYNELRVAPEEHPVLLTEAPMNPKSNREKMTQIMFETFNVPAFYVSIQAVLSSYSSGRTTGIVLDSGDGVTHVVPIYAGFSLPHAILRIDLAGRDLTDYLMKILSERGYTFSTTAEREIVRDIKEKLCYVALDYDQELQTASQSSAIEKSYELPDGQVITIGNERFRAPEALFHPSVLGLEAAGIDQTTYNSIMKCDLDVRKELYGNIVMSGGTTMFPGIAERMQKEITALAPSSMKVKIIAPPERKYSVWIGGSILASLSTFQQMWIS

SEQ ID NO: 30312 - protein, 326 aa, Pichia fermentans
SIVGRPRHQGIMVGMGQKDSYVGDEAQSKRGILTLRYPIEHGIVTNWDDMEKIWHHTFYNELRVAPEEHPVLLTEAPMNPKSNREKMTQIMFETFNVPAFYVSIQAVLSLYSSGRTTGIVLDSGDGVTHVVPIYAGFSLPHAILRIDLAGRDLTDYLMKILSERGYTFSTTAEREIVRDIKEKLCYVALDYDQELQTASQSSAIEKSYELPDGQVITIGNERFRAPEALFHPSVLGLEAAGIDQTTYNSIMKCDLDVRKELYGNIVMSGGTTMFPGIAERMQKEITALAPSSMKVKIIAPPERKYSVWIGGSILASLSTFQQMWIS

SEQ ID NO: 30313 - protein, 744 aa, Burkholderia vietnamiensis G4
MTESASASSVAAPSFDDVLAFVRERAGAARLSTGELLADHSAGTASIMRTLNVDPHAMQAAALFVLTPHLSDPERELTERFGEEVARLVADVRKLLRLGTVSLRAAQNAMPDAGRDAAQQRRTQIEALRKMLLAFAQDIRVVLIRLASRLQSLRYYAAAKADPPPDVARETLEIYAPLANRLGIWQLKWELEDLAFRFEDPVTYKRIAKLLDEKRIEREAYVAQAIERLQHELAQAHIPADVSGRPKHIYSIWRKMRGKELDFSELYDVRAFRVIVPDIKDCYTVLGIVHHLWQPVPKEFDDYISRPKPNGYKSLHTVVIGDDGRAFEVQIRTQEMHRFAEYGVAAHWRYKEAGVRGYGGQFSASDKYDEKIAWLRQLLAWKDDVEDGGEVSGDQAWAQLRETSLDDDHIYVLTPQARVIALPQGATPVDFAYHLHSELGHRCRGARVDGAMVPLNTSLANGQTVEIVAVKEGGPSRDWLNPQLGYLKSSRARQKVRAWFNSIEQEENIAHGRALVEKTLQREGKTSVNLDNLAAKLGFKSPDDLFSVVGKEEFSLRNIEQALSDAPPPEHAPEAPADFEKRSSGASVAHGASTGVLVVGVDALLTQLARCCRPAPPDPISGFVTRGKGMSIHRSDCPTFVRMAERAPERVLQTTWSADVLGGRGASVYPVDLMIEASDRQGLLRDISEVFAREKMNVVGVKTQSRRNTAFMQFTVEVSNAAQVQRACTLLGEVQGVVRAGRKA

SEQ ID NO: 30314 - protein, 876 aa, Vibrio angustum S14
MNEKYSTLKSNVSMLGHLLGNTIKTAHGDELLDKVETIRKLSKSAHSGSEEDRAKLIDELQNLPDDQLLPVARAFSQFLNLTNIAEQYHTISRQCETTLCSPDALDELFNKLTDNDVNQLDSIEAVRELNIDLVLTAHPTEIARRTMIHKLVQINKCLSQLELSELSTSERARIEQRLEQLIAQAWHSDVIRQQRPTPIDEAKWGYAVIENSLWQAVPEFLRLFDEKLQQHLGEALPLDASPVTFSSWMGGDRDGNPFVTSNVTREVLSLSRWKAADLYLNDIQELINELSMTQCNETVRELAGEEHEPYRAILKQLRNKLVHTRDNLDAKIHGQKPTSDIVIEDIAELWDPLYACYQSLHECGMAIIADGLLLDTLRRVKCFGVHLVRLDIRQESTRHSDVISELTRYLGLGDYDQWSEQDKIAFLVRELSSKRPLLPRDWEPSAEVKEVIETCKTIAEQSREALGSYVISMARTASDVLAVHLLLQEAGCPFRMDVCPLFETLDDLNNGADVIEQLLNIDWYRGFIQNHQMVMIGYSDSAKDAGVMSAGWAQYSAMEKLVDVCEQAGVEITLFHGRGGSIGRGGAPAHAALLSQPPRSLKGGLRVTEQGEMIRFKLGLPEVAINSLSLYASATLEANLLPPPAPKQEWRELMDVLSEVSCEAYRNVVRVDPEFVPYFRAATPELELGKLPLGSRPAKRNPQGGVESLRAIPWIFAWSQNRLLLPAWLGAGEAIQYSINKGHAKLLEDMCREWPFFSTRLGMLEMVYTKTNTGIAKYYDERLTDESLWPLGQKLRDQLGKDIKAVLTVENNDHLMEQDPWGAESIRLRNIYVEPLNMLQAELLYRTRQQEELPPALEEALMVTIAGIATGMRNTG

SEQ ID NO: 30315 - protein, 327 aa, Kineococcus radiotolerans SRS30216
MARVTVVTPNPAVDITYRVPRQRIGETVRVQDVLRRAGGKGLNVARVLRTLGVDVVAVHPLGGAAGQWITRELAAEGIPAHAVELADETRSTVTVVDDVEHPTVLAEAGPHVPPRAWAQLNERVAQSCEDGDVLVVSGSLPPRTTPAYVTDLIGAGRRAGARVIVDVSGAGLLAAAAAGADLLKPNAEEALAATGAADLPAAVAQLLRAGARGVVVSRGSAGLIAVGPDGQQVYQDAVPGVSGNPTGAGDAATAGIAAAWARGAPLPVALRWASLLGAAAVLRPSAGEVDPDDLTVLAARLPDLPAALRSSSLLPATTSTPPGTRAG

SEQ ID NO: 30316 - protein, 161 aa, Shewanella oneidensis MR-1
MEYNTSELCDMYLDVVDVVEPMFSNYGGCSSFGGSISTIKCFEDNGLITDVLQEDGQGKVLLVDGGGSLRRALIDGTIAELAVSNNWEGIIVYGSVRDVDALEELDIGIQALASIPVGADGNSVGEVDIPVNFGGVTFLPGDHIYADNTGIILSPEPLDIE

SEQ ID NO: 30317 - protein, 420 aa, Silicibacter pomeroyi DSS-3
MTVRQDQLANGFRIVSENMPGLQSAAIGIWVTAGGRHERIDQNGIAHFLEHMAFKGTERRSALQIAEAIEDVGGYINAYTSREVTAYYARVLKEDVALALDVIGDIVLNPVFDPREIEVERGVILQEIGQAHDTPDDVIFDWLQEESYRDQPLGRTILGPVERVSAFSRADLSAFVADNYGPEQMILSATGAVDHDLLVRLAEEMFGHLTPRKGALAVPALFTGGEARREKALEQAHFALALEGPGYRDDAIYTAQIYSSALGGGMSSRLFQEVREVRGLCYTIFAQTGAYADTGTTTIYAGTSAGQVAELAGITIDEMKRAAEDMSEAEVARARAQMKAGMLMGLESPSNRAERLARLVQIWGKVPSLEDTVARIDAVTTADVRAFAEQMAVEAPAALALYGPVSAAPNLAELQERRAA

SEQ ID NO: 30318 - protein, 136 aa, Arabidopsis thaliana
MASSMLSSATMVASPAQATMVAPFNGLKSSAAFPATRKANNDITSITSNGGRVNCMQVWPPIGKKKFETLSYLPDLTDSELAKEVDYLIRNKWIPCVEFDTDLCTVSTVTHPDTMMDGTGQCGSFPCSVAPTPLKC

SEQ ID NO: 30319 - protein, 127 aa, Bordetella bronchiseptica RB50
MSIVELTKDTFQDAITPDGTLIIDFWAPWCGPCRGFAPVFEQAAEQHPDVTFAKVNTDVEQELAGALGIRSIPTLMVFREKVLLFSQPGALSAGQLGELLTKVKEVDMAEVHRDIAQARENGAGEQA

SEQ ID NO: 30320 - protein, 447 aa, Salmonella enterica subsp. enterica serovar Typhi str. CT18
MDQTCSLESFLNHVQKRDPHQTEFAQAVREVMTTLWPFLEQNPRYRHMSLLERLVEPERVIQFRVVWLDDKNQVQVNRAWRVQFNSAIGPYKGGMRFHPSVNLSILKFLGFEQTFKNALTTLPMGGGKGGSDFDPKGKSEGEVMRFCQALMTELYRHLGPDTDVPAGDIGVGGREVGFMAGMMRKLSNNSACVFTGKGLSFGGSLIRPEATGYGLVYFTEAMLKRHGLGFEGMRVAVSGSGNVAQYAIEKAMAFGARVVTASDSSGTVVDESGFTPEKLARLCEIKASRDGRVADYAREFGLTYLEGQQPWSVPVDIALPCATQNELDVDAARVLIANGVKAVAEGANMPTTIEATDLFLEAGVLFAPGKAANAGGVATSGLEMAQNAARLSWKAEKVDARLHHIMLDIHHACVKYGGDNKHTNYVQGANIAGFVKVADAMLAQGVI

SEQ ID NO: 30321 - protein, 176 aa, Magnetospirillum magnetotacticum MS-1
MTVVGVGYTAVEEALYLANLAKSVTVIHRRGEFRAERILQERLFKHANVAVKWHHAVEEICGSDTPPSVTHLRLKDLRSGEIVEHATDGLFVAIGHQPATAIFEGQLPMRHGGYIAVTPGTTATGIPGVFAAGDVTDDVYRQAITAAGMGCMAALEAEKYLAALDVGESPAQAAAE

SEQ ID NO: 30322 - protein, 174 aa, Triticum aestivum
MATMMTMSSFAGAAVLPRGSAGHFGAQSLPALGRRALIVRAQTEGPSAPPPNTPKASTSIWDALAFAGPAPERINGRLAMVGFVTALAVEAGRGDGLLSQLGSGTGQAWFAYSVAVLSVASLVPLLQGESAEGKAGAIMNANAELWNGRFAMLGLAGLGGHEIITGAPFINVKK

SEQ ID NO: 30323 - protein, 116 aa, Zea mays
MARAQVMLMAVALVLMLAAVPRAAVAIDCGHVDSLVRPCLSYVQGGPGPSGQCCDGVKNLHNQARSQSDRQSACNCLKGIARGIHNLNEDNARSIPPKCGVNLPYTISLNIDCSRV

SEQ ID NO: 30324 - protein, 397 aa, Candida albicans SC5314
MASEGITEIDSGLIETNYDNVVYKFDDLNLKPNIVRGIFGYGYETPSAIQQRAILPITEGRDVLAQAQSGTGKTATFTISALQRINENEKATQALILAPTRELALQIKNVITAIGLYLKVTVHASIGGTSMSDDIEAFRSGVQIVVGTPGRVLDMIERRYFKTDKVKMFILDEADEMLSSGFKEQIYNIFRLLPETTQIVLLSATMPQDVLEVTTKFMNNPVRILVKKDELTLEGIKQFYINVELEDYKFDCLCDLYDSISVTQAVIFCNTRSKVEFLTNKLREQHFTVSAIHADLPQAERDTIMKEFRSGSSRILISTDLLARGIDVQQVSLVINYDLPANKENYIHRIGRGGRFGRKGVAINFVTDRDVGMMREIEKFYSTQIEEMPADIGALFA

SEQ ID NO: 30325 - protein, 163 aa, Colwellia psychrerythraea 34H
MLDLLPDLFDQYPEQLSLANQAFTDYGKNTIFYGEIVTVSCFEDNSKVKEILATDGSGKVLVVDGKGSMNRALLGDMIAENAVKNNWQAVVINGCIRDAGTIRTLEIAVKAIGCNPIKTEKLGVGDTNIVVNFANVEFIPGWYVYGDENGLAVSKSKLSVTAG

SEQ ID NO: 30326 - protein, 516 aa, Oryza sativa
HLFPFPLIVLHYLATNHRTPTTCKETKNHHPPPPSPPRLPIIWHLHLIGGLLHVSLRELAHRYSPDLMLLHLGQVPNLIVSSPHATKAVLRTHNLVFASRPYSLIADILLYGPSDVRLSPYREYWRRRIITTHLLTNKKVRSYRVSREEEVHKEMAKVHELSTKGMAVDMTELFSTFSNDLICRLVSGKNFQGEGRNKLFRQLFKANSVLLAGFNLKDYYPGLARLKAVSMVMCAKARNTRKLWDELLDEIIDERMSKQQCEHDEGNDQDEMNFVNVLLLQEQGITREHLKAILVDMYQAGTETSSVVLVFAMAELMQKPHLMAKLQAELRTTIPKQGHELITERDLTDMTYLKAVIKETLRLHPPTPLLLPHLAMADCNIDGYTVRSGTRVIVNAWAIGRNSESWEAAEEFLPERFVDDGSAANVDFIGTDFQFLPFGAGRRICPGINFASASMEIILANLLYHFDWDVSAEAAIDKDGIDMAEAFGLSVQLKEKLLLVPVDYKDGMQDSAVILL

SEQ ID NO: 30327 - protein, 365 aa, Pseudomonas putida
MPAHSFRIAAIPGDGIGLEVLPEGIRVLEAAALKHGLALEFDTFEWASCDYYLQHGKMMPDDWAEQLKQYDAIYFGAVDWPDKVPDHISLWGSLLKFRREFDQYVNIRPVRLFPGVPCALANRKVGDIDFVVVRENTEGEYSSLGGIMFENTENEIVIQESIFTRRGVDRILKYAFDLAEKRERKHVTSATKSNGMAISMPYWDKRTEAMAAHYPHVSWDKQHIDILCARFVLQPERFDVVVVASNLFGDILSDLGPACAGTIGIAPSANLNPERNFPSLFEPVHGSAPDIFGKNIANPIAMIWSGALMLEFLGQGDERYQRAHDDMLNAIERVIADGSVTPDMGGTLSTQQVGAAISDTLARLD

SEQ ID NO: 30328 - protein, 347 aa, artificial
  consensus
  Misc_feature (1)..(1): location 1 can be a Gap or Phe
  Misc_feature (2)..(2): location 2 can be a Gap or Thr
  Misc_feature (3)..(3): location 3 can be a Gap or Phe
  Misc_feature (4)..(4): location 4 can be a Gap or Val
  Misc_feature (5)..(5): location 5 can be a Gap or Leu
  Misc_feature (6)..(6): location 6 can be a Gap or Cys
  Misc_feature (7)..(7): location 7 can be a Gap or Lys
  Misc_feature (8)..(8): location 8 can be a Gap or Tyr
  Misc_feature (9)..(9): location 9 can be a Gap or Met or Cys
  Misc_feature (10)..(10): location 10 can be a Gap or Ser or Thr
  Misc_feature (11)..(11): location 11 can be a Gap or Pro or Ser or Arg
  Misc_feature (12)..(12): location 12 can be a Gap or Tyr or Ala or Ser
  Misc_feature (13)..(13): location 13 can be a Gap or Ser or Cys
  Misc_feature (14)..(14): location 14 can be a Gap or Pro or His
  Misc_feature (15)..(15): location 15 can be a Gap or Glu or Thr
  Misc_feature (16)..(16): location 16 can be a Gap or Gln or Ser
  Misc_feature (17)..(17): location 17 can be Ile or a Gap or Arg or Gly
  Misc_feature (18)..(18): location 18 can be a Gap or Val or Thr
  Misc_feature (19)..(19): location 19 can be a Gap or Ser or His
  Misc_feature (20)..(20): location 20 can be a Gap or Val or Cys
  Misc_feature (21)..(21): location 21 can be a Gap or Leu or Ser
  Misc_feature (22)..(22): location 22 can be Ile or a Gap or Asp or Glu
  Misc_feature (23)..(23): location 23 can be a Gap or Leu or Pro or Met
  Misc_feature (24)..(24): location 24 can be Asn or a Gap or Val or Pro or Met
  Misc_feature (25)..(25): location 25 can be a Gap or Glu or Ala or Ser or Met or Gly
  Misc_feature (26)..(26): location 26 can be a Gap or Pro or Ala or Ser or Gly
  Misc_feature (27)..(27): location 27 can be a Gap or Met or Arg or Gly
  Misc_feature (28)..(28): location 28 can be a Gap or Ser or Gly
  Misc_feature (29)..(29): location 29 can be a Gap or Lys or Pro or Ser or Gly
  Misc_feature (30)..(30): location 30 can be a Gap or Glu or Ser or Thr or Gly
  Misc_feature (31)..(31): location 31 can be a Gap or Glu or Leu or Ser or Gly
  Misc_feature (32)..(32): location 32 can be Ala or Arg or Met or Thr
  Misc_feature (33)..(33): location 33 can be Gln or Ala or Ser or Arg or Gly
  Misc_feature (34)..(34): location 34 can be Glu or Phe or Ser or Met or Thr
  Misc_feature (35)..(35): location 35 can be Asp or Ala or Pro or Ser
  Misc_feature (36)..(36): location 36 can be Ile or Asn or Pro or Ser
  Misc_feature (37)..(37): location 37 can be Asn or Glu or Pro or Ser
  Misc_feature (38)..(38): location 38 can be Pro or Ala or Leu or Ser
  Misc_feature (39)..(39): location 39 can be a Gap or Pro or Ala or Ser or Gly
  Misc_feature (40)..(40): location 40 can be a Gap or Val or Leu or Ser or Gly
  Misc_feature (41)..(41): location 41 can be a Gap or Pro or Ser or Gly
  Misc_feature (42)..(42): location 42 can be Ile or a Gap or Val or Ala or Pro
  Misc_feature (43)..(43): location 43 can be a Gap or Ser or Gly
  Misc_feature (44)..(44): location 44 can be a Gap or Val or Asp or Ala or Ser or Gly
  Misc_feature (45)..(45): location 45 can be a Gap or Ser or Gly
  Misc_feature (46)..(46): location 46 can be a Gap or Ser or Gly
  Misc_feature (47)..(47): location 47 can be Ala or Pro or Gly
  Misc_feature (48)..(48): location 48 can be Ser or Cys or Gly or Thr
  Misc_feature (49)..(49): location 49 can be Ala or Ser or Gly
  Misc_feature (50)..(50): location 50 can be Asn or Lys
  Misc_feature (51)..(51): location 51 can be Arg
  Misc_feature (52)..(52): location 52 can be Gly or Thr
  Misc_feature (53)..(53): location 53 can be Ile or Arg
  Misc_feature (54)..(54): location 54 can be Asp
  Misc_feature (55)..(55): location 55 can be Ala or Pro
  Misc_feature (56)..(56): location 56 can be Glu
  Misc_feature (57)..(57): location 57 can be Asp or Glu
  Misc_feature (58)..(58): location 58 can be Asp or Glu
  Misc_feature (59)..(59): location 59 can be a Gap or Glu
  Misc_feature (60)..(60): location 60 can be Val
  Misc_feature (61)..(61): location 61 can be Tyr
  Misc_feature (62)..(62): location 62 can be Val or Leu
  Misc_feature (63)..(63): location 63 can be Asp
  Misc_feature (64)..(64): location 64 can be Asn
  Misc_feature (65)..(65): location 65 can be Leu
  Misc_feature (66)..(66): location 66 can be His or Arg
  Misc_feature (67)..(67): location 67 can be Ser
  Misc_feature (68)..(68): location 68 can be Gln or His
  Misc_feature (69)..(69): location 69 can be Lys
  Misc_feature (70)..(70): location 70 can be Arg
  Misc_feature (71)..(71): location 71 can be Tyr
  Misc_feature (72)..(72): location 72 can be Leu
  Misc_feature (73)..(73): location 73 can be Asn or Ser
  Misc_feature (74)..(74): location 74 can be Glu
  Misc_feature (75)..(75): location 75 can be Ile
  Misc_feature (76)..(76): location 76 can be Val or Met
  Misc_feature (77)..(77): location 77 can be Ala
  Misc_feature (78)..(78): location 78 can be Ser or Cys
  Misc_feature (79)..(79): location 79 can be Met or Ser
  Misc_feature (80)..(80): location 80 can be Xaa or Leu
  Misc_feature (81)..(81): location 81 can be Asn
  Misc_feature (82)..(82): location 82 can be Gly
  Misc_feature (83)..(83): location 83 can be Leu
  Misc_feature (84)..(84): location 84 can be Ser or Thr
  Misc_feature (85)..(85): location 85 can be Val
  Misc_feature (86)..(86): location 86 can be Gly
  Misc_feature (87)..(87): location 87 can be Asp
  Misc_feature (88)..(88): location 88 can be Ser
  Misc_feature (89)..(89): location 89 can be Leu
  Misc_feature (90)..(90): location 90 can be Val or Ala or Pro
  Misc_feature (91)..(91): location 91 can be Val or Asp or Ala
  Misc_feature (92)..(92): location 92 can be Asn
  Misc_feature (93)..(93): location 93 can be Ile or Val or Leu or Met
  Misc_feature (94)..(94): location 94 can be Xaa or Leu or Met
  Misc_feature (95)..(95): location 95 can be Asp or Glu
  Misc_feature (96)..(96): location 96 can be Ser
  Misc_feature (97)..(97): location 97 can be Pro
  Misc_feature (98)..(98): location 98 can be Glu or Ala or Ser
  Misc_feature (99)..(99): location 99 can be Arg
  Misc_feature (100)..(100): location 100 can be Ser
  Misc_feature (101)..(101): location 101 can be Asp or Glu
  Misc_feature (102)..(102): location 102 can be a Gap or Asn or Ser or Thr
  Misc_feature (103)..(103): location 103 can be a Gap or Ala or Ser or Met or Thr
  Misc_feature (104)..(104): location 104 can be a Gap or Phe
  Misc_feature (105)..(105): location 105 can be a Gap or Ser or Thr
  Misc_feature (106)..(106): location 106 can be a Gap or Leu or Phe
  Misc_feature (107)..(107): location 107 can be a Gap or Leu
  Misc_feature (108)..(108): location 108 can be a Gap or Tyr or Ser
  Misc_feature (109)..(109): location 109 can be a Gap or Pro
  Misc_feature (110)..(110): location 110 can be Asn or a Gap
  Misc_feature (111)..(111): location 111 can be Asn or a Gap
  Misc_feature (112)..(112): location 112 can be a Gap or His
  Misc_feature (113)..(113): location 113 can be Ile or a Gap or Ser
  Misc_feature (114)..(114): location 114 can be Tyr or Leu or Phe or His or Cys
  Misc_feature (115)..(115): location 115 can be Ile or Tyr or Phe or Arg
  Misc_feature (116)..(116): location 116 can be Asp or Arg
  Misc_feature (117)..(117): location 117 can be Asp
  Misc_feature (118)..(118): location 118 can be Ile or Glu or Leu or Met
  Misc_feature (119)..(119): location 119 can be Ile or Ser
  Misc_feature (120)..(120): location 120 can be Ile or a Gap or Leu or Phe
  Misc_feature (121)..(121): location 121 can be Leu or Ser
  Misc_feature (122)..(122): location 122 can be Gln
  Misc_feature (123)..(123): location 123 can be Tyr or Asp
  Misc_feature (124)..(124): location 124 can be Ser
  Misc_feature (125)..(125): location 125 can be Pro
  Misc_feature (126)..(126): location 126 can be Met
  Misc_feature (127)..(127): location 127 can be Ser or Thr
  Misc_feature (128)..(128): location 128 can be Xaa or Glu
  Misc_feature (129)..(129): location 129 can be Asp or Gln
  Misc_feature (130)..(130): location 130 can be Ser
  Misc_feature (131)..(131): location 131 can be Asp or Cys
  Misc_feature (132)..(132): location 132 can be Asp or Glu
  Misc_feature (133)..(133): location 133 can be Tyr or Ala or Leu or Ser
  Misc_feature (134)..(134): location 134 can be Ile or Arg
  Misc_feature (135)..(135): location 135 can be Tyr or Phe or Cys
  Misc_feature (136)..(136): location 136 can be Tyr or Phe or Cys
  Misc_feature (137)..(137): location 137 can be Asp or Glu
  Misc_feature (138)..(138): location 138 can be Asp or Glu or Thr
  Misc_feature (139)..(139): location 139 can be Gln or Pro or Gly
  Misc_feature (140)..(140): location 140 can be a Gap or Val or Leu or Thr
  Misc_feature (141)..(141): location 141 can be Ile or Asn or Ala or Pro or His
  Misc_feature (142)..(142): location 142 can be a Gap or Pro or Ser or Thr
  Misc_feature (143)..(143): location 143 can be Asn or Ala or Ser or Cys
  Misc_feature (144)..(144): location 144 can be Leu or Ser or Thr or Gly
  Misc_feature (145)..(145): location 145 can be Asn or Ser or Thr
  Misc_feature (146)..(146): location 146 can be a Gap or Gln or Ser or Met or His
  Misc_feature (147)..(147): location 147 can be a Gap or Pro or Ser or Gly or Thr
  Misc_feature (148)..(148): location 148 can be a Gap or Asp or Gln or Ser
  Misc_feature (149)..(149): location 149 can be Asn or Lys or Gln or Ala or His
  Misc_feature (150)..(150): location 150 can be Pro or Leu or Met
  Misc_feature (151)..(151): location 151 can be Ile or Val or Asp or Glu
  Misc_feature (152)..(152): location 152 can be Ser
  Misc_feature (153)..(153): location 153 can be Leu or Pro or Arg
  Misc_feature (154)..(154): location 154 can be Pro or Ser
  Misc_feature (155)..(155): location 155 can be Ser or Gly or Thr
  Misc_feature (156)..(156): location 156 can be Ser
  Misc_feature (157)..(157): location 157 can be Pro
  Misc_feature (158)..(158): location 158 can be Val or Met
  Misc_feature (159)..(159): location 159 can be Ser
  Misc_feature (160)..(160): location 160 can be a Gap or Ser
  Misc_feature (161)..(161): location 161 can be Pro
  Misc_feature (162)..(162): location 162 can be Tyr or His or Cys
  Misc_feature (163)..(163): location 163 can be Arg
  Misc_feature (164)..(164): location 164 can be Tyr or Phe or His
  Misc_feature (165)..(165): location 165 can be Gln or His
  Misc_feature (166)..(166): location 166 can be Lys or Arg
  Misc_feature (167)..(167): location 167 can be Pro or Gln or Ser
  Misc_feature (168)..(168): location 168 can be Leu or Gln
  Misc_feature (169)..(169): location 169 can be Asn or Ala or Ser or Thr
  Misc_feature (170)..(170): location 170 can be Ala or Ser or Thr or Gly
  Misc_feature (171)..(171): location 171 can be Ile or Leu or Phe or Ser or Thr
  Misc_feature (172)..(172): location 172 can be Asn or Asp or Pro or Leu or Ser or Thr
  Misc_feature (173)..(173): location 173 can be Pro or Ser
  Misc_feature (174)..(174): location 174 can be a Gap or Pro
  Misc_feature (175)..(175): location 175 can be a Gap or Gln
  Misc_feature (176)..(176): location 176 can be a Gap or Pro
  Misc_feature (177)..(177): location 177 can be a Gap or Ser
  Misc_feature (178)..(178): location 178 can be a Gap or Pro or Leu
  Misc_feature (179)..(179): location 179 can be Ile or a Gap or Thr
  Misc_feature (180)..(180): location 180 can be Ile or a Gap or Val
  Misc_feature (181)..(181): location 181 can be Ile or a Gap or Leu
  Misc_feature (182)..(182): location 182 can be a Gap or Ala or His
  Misc_feature (183)..(183): location 183 can be a Gap or Pro or His
  Misc_feature (184)..(184): location 184 can be a Gap or Leu or Ser
  Misc_feature (185)..(185): location 185 can be a Gap or Ser or His or Thr
  Misc_feature (186)..(186): location 186 can be Asn or a Gap or Ser or Thr
  Misc_feature (187)..(187): location 187 can be Trp or Ala or Leu or Ser or Cys
  Misc_feature (188)..(188): location 188 can be Asn or Pro or Ser or His
  Misc_feature (189)..(189): location 189 can be Ala or Pro or Ser or Gly or Thr
  Misc_feature (190)..(190): location 190 can be Tyr or Ser or Cys
  Misc_feature (191)..(191): location 191 can be Tyr or Pro or Met or His
  Misc_feature (192)..(192): location 192 can be Ile or a Gap or Ala or Leu or Ser or Gly
  Misc_feature (193)..(193): location 193 can be a Gap or Pro or Phe or Ser
  Misc_feature (194)..(194): location 194 can be Asn or a Gap or Pro or Met or Ser
  Misc_feature (195)..(195): location 195 can be Val or Ala or Ser or Gly or Cys
  Misc_feature (196)..(196): location 196 can be Ala or Ser or Thr
  Misc_feature (197)..(197): location 197 can be Asn or Leu or Ala or Ser or Thr
  Misc_feature (198)..(198): location 198 can be Ile or Val or Ala or Ser or Thr
  Misc_feature (199)..(199): location 199 can be Ala or Ser or Thr
  Misc_feature (200)..(200): location 200 can be Val or Thr or Cys
  Misc_feature (201)..(201): location 201 can be Val or Ala or Pro or Ser
  Misc_feature (202)..(202): location 202 can be Gln or Cys
  Misc_feature (203)..(203): location 203 can be Pro or Ser
  Misc_feature (204)..(204): location 204 can be Asn or His or Arg
  Misc_feature (205)..(205): location 205 can be Ala or Pro or Gln
  Misc_feature (206)..(206): location 206 can be Arg
  Misc_feature (207)..(207): location 207 can be Arg or Ser or Gly
  Misc_feature (208)..(208): location 208 can be a Gap or Xaa or Gly
  Misc_feature (209)..(209): location 209 can be Ser
  Misc_feature (210)..(210): location 210 can be Asp or Glu
  Misc_feature (211)..(211): location 211 can be Asn or Ser or Thr
  Misc_feature (212)..(212): location 212 can be Asp or Glu or Gly
  Misc_feature (213)..(213): location 213 can be Arg or Gly
  Misc_feature (214)..(214): location 214 can be Arg or Gly
  Misc_feature (215)..(215): location 215 can be Phe or Ser
  Misc_feature (216)..(216): location 216 can be Pro
  Misc_feature (217)..(217): location 217 can be Ser
  Misc_feature (218)..(218): location 218 can be Ser
  Misc_feature (219)..(219): location 219 can be Pro
  Misc_feature (220)..(220): location 220 can be Asn or Ser
  Misc_feature (221)..(221): location 221 can be Asp
  Misc_feature (222)..(222): location 222 can be Ile or Met
  Misc_feature (223)..(223): location 223 can be Cys
  Misc_feature (224)..(224): location 224 can be Pro or His
  Misc_feature (225)..(225): location 225 can be Val or Ser or Gly
  Misc_feature (226)..(226): location 226 can be Ala or Ser or Gly
  Misc_feature (227)..(227): location 227 can be Asp
  Misc_feature (228)..(228): location 228 can be Leu
  Misc_feature (229)..(229): location 229 can be Arg or Gly
  Misc_feature (230)..(230): location 230 can be Lys or Arg
  Misc_feature (231)..(231): location 231 can be Ala or Thr
  Misc_feature (232)..(232): location 232 can be Ala
  Misc_feature (233)..(233): location 233 can be Leu
  Misc_feature (234)..(234): location 234 can be Pro or Leu
  Misc_feature (235)..(235): location 235 can be Arg
  Misc_feature (236)..(236): location 236 can be Ala or Ser
  Misc_feature (237)..(237): location 237 can be Val
  Misc_feature (238)..(238): location 238 can be Gln
  Misc_feature (239)..(239): location 239 can be Met
  Misc_feature (240)..(240): location 240 can be Arg
  Misc_feature (241)..(241): location 241 can be Val or Thr
  Misc_feature (242)..(242): location 242 can be Gln or His
  Misc_feature (243)..(243): location 243 can be Pro or Gly
  Misc_feature (244)..(244): location 244 can be a Gap or Xaa or Pro or Cys
  Misc_feature (245)..(245): location 245 can be a Gap or Ser or Gly
  Misc_feature (246)..(246): location 246 can be Ile or Tyr or Pro or Ser
  Misc_feature (247)..(247): location 247 can be Ala or Ser or His
  Misc_feature (248)..(248): location 248 can be Ala or Ser
  Misc_feature (249)..(249): location 249 can be Tyr or Leu or Ser or Thr
  Misc_feature (250)..(250): location 250 can be Asp or Xaa or Glu or Ser
  Misc_feature (251)..(251): location 251 can be Pro or Leu or Gly
  Misc_feature (252)..(252): location 252 can be Pro or Ser or Thr
  Misc_feature (253)..(253): location 253 can be Phe or Ser
  Misc_feature (254)..(254): location 254 can be Asn or Val or Cys or Gly
  Misc_feature (255)..(255): location 255 can be Ile or Val or Ser or Gly
  Misc_feature (256)..(256): location 256 can be Asn or Asp or Arg or Gly
  Misc_feature (257)..(257): location 257 can be Pro or Gln or Gly
  Misc_feature (258)..(258): location 258 can be a Gap or Glu or Gly
  Misc_feature (259)..(259): location 259 can be Glu or Gln or Pro or Ser
  Misc_feature (260)..(260): location 260 can be Asp or Glu or Pro or Ala
  Misc_feature (261)..(261): location 261 can be Lys or Pro or Arg or His
  Misc_feature (262)..(262): location 262 can be Asn or Val or Leu or Ala or Met
  Misc_feature (263)..(263): location 263 can be Ile or His or Cys
  Misc_feature (264)..(264): location 264 can be Asp or Glu or Phe or Ser
  Misc_feature (265)..(265): location 265 can be Lys or Pro or His or Ser
  Misc_feature (266)..(266): location 266 can be Asp or Glu or Ser
  Misc_feature (267)..(267): location 267 can be a Gap or Asp or Glu or Met or Gly
  Misc_feature (268)..(268): location 268 can be a Gap or Glu or Arg
  Misc_feature (269)..(269): location 269 can be Asp or Glu or Pro or Ser or His
  Misc_feature (270)..(270): location 270 can be Asp or Glu or Cys
  Misc_feature (271)..(271): location 271 can be a Gap or Pro or Arg or His or Ser
  Misc_feature (272)..(272): location 272 can be a Gap or Tyr or Glu or Gln or Gly
  Misc_feature (273)..(273): location 273 can be a Gap or Tyr or Leu or His or Met
  Misc_feature (274)..(274): location 274 can be Asn or Lys or Glu
  Misc_feature (275)..(275): location 275 can be Lys or Arg or His or Ser
  Misc_feature (276)..(276): location 276 can be Leu or Met or Gly
  Misc_feature (277)..(277): location 277 can be Val or Glu
  Misc_feature (278)..(278): location 278 can be Asp or Gly
  Misc_feature (279)..(279): location 279 can be Ile or Val or Glu or Leu
  Misc_feature (280)..(280): location 280 can be Glu or Pro or Ser or Arg or Gly
  Misc_feature (281)..(281): location 281 can be Tyr or Asp or Glu or Gly
  Misc_feature (282)..(282): location 282 can be Tyr or Pro or Ala or Thr
  Misc_feature (283)..(283): location 283 can be a Gap or Glu or Gln
  Misc_feature (284)..(284): location 284 can be a Gap or Ile or Val or Arg or Gly
  Misc_feature (285)..(285): location 285 can be a Gap or Glu or Pro or Ser
  Misc_feature (286)..(286): location 286 can be a Gap or Glu or Ser or Gly
  Misc_feature (287)..(287): location 287 can be a Gap or Ser or Gly or Cys
  Misc_feature (288)..(288): location 288 can be a Gap or Asn or Lys or Arg or His or Ser
  Misc_feature (289)..(289): location 289 can be a Gap or Lys or Pro or Arg or Ser
  Misc_feature (290)..(290): location 290 can be a Gap or Ile or Lys or Glu or Ser
  Misc_feature (291)..(291): location 291 can be a Gap or Ile or Ser or Thr or Gly
  Misc_feature (292)..(292): location 292 can be a Gap or Ile or Val or Asp or Ala or Cys
  Misc_feature (293)..(293): location 293 can be a Gap or Asn or Lys or Pro or Ser
  Misc_feature (294)..(294): location 294 can be a Gap or Asp or Glu or Ala
  Misc_feature (295)..(295): location 295 can be a Gap or Val or Ala or Leu or Pro or Gly or Thr
  Misc_feature (296)..(296): location 296 can be a Gap or Val or Asp or Glu or Ser or Thr
  Misc_feature (297)..(297): location 297 can be a Gap or Tyr or Phe or Met or Ser or Gly
  Misc_feature (298)..(298): location 298 can be a Gap or Asn or Tyr or Arg
  Misc_feature (299)..(299): location 299 can be a Gap or Leu or Gln or His
  Misc_feature (300)..(300): location 300 can be a Gap or Asp or Arg or Met or Gly or Cys
  Misc_feature (301)..(301): location 301 can be a Gap or Asn or Glu or Ala or Pro or Arg
  Misc_feature (302)..(302): location 302 can be a Gap or Asn or Lys or Asp or Glu or Arg
  Misc_feature (303)..(303): location 303 can be a Gap or Asn or Lys or His
  Misc_feature (304)..(304): location 304 can be a Gap or Asp or Pro or Ser
  Misc_feature (305)..(305): location 305 can be a Gap or Tyr or Phe or Cys
  Misc_feature (306)..(306): location 306 can be a Gap or Arg or Gly
  Misc_feature (307)..(307): location 307 can be a Gap or Val or Arg
  Misc_feature (308)..(308): location 308 can be a Gap or Gln or Pro or Leu or Ser
  Misc_feature (309)..(309): location 309 can be a Gap or Asn or Glu
  Misc_feature (310)..(310): location 310 can be a Gap or His or Met
  Misc_feature (311)..(311): location 311 can be a Gap or Asn or Asp or Glu
  Misc_feature (312)..(312): location 312 can be a Gap or Ile or Pro
  Misc_feature (313)..(313): location 313 can be a Gap or Asp or Lys
  Misc_feature (314)..(314): location 314 can be a Gap or Tyr or Glu or Ala
  Misc_feature (315)..(315): location 315 can be a Gap or Ile or Ala
  Misc_feature (316)..(316): location 316 can be a Gap or Asn or Asp or Glu
  Misc_feature (317)..(317): location 317 can be a Gap or Asn or Asp or Ser or Gly
  Misc_feature (318)..(318): location 318 can be a Gap or Ser or Cys or Gly
  Misc_feature (319)..(319): location 319 can be a Gap or Thr or Gly
  Misc_feature (320)..(320): location 320 can be a Gap or Ala or Pro or Ser
  Misc_feature (321)..(321): location 321 can be a Gap or Asp or His
  Misc_feature (322)..(322): location 322 can be a Gap or Asp or Gly
  Misc_feature (323)..(323): location 323 can be a Gap or Val or Cys
  Misc_feature (324)..(324): location 324 can be a Gap or Val or Leu
  Misc_feature (325)..(325): location 325 can be a Gap or Ser
  Misc_feature (326)..(326): location 326 can be a Gap or Asp or Gly
  Misc_feature (327)..(327): location 327 can be a Gap or Pro or Leu
  Misc_feature (328)..(328): location 328 can be a Gap or Lys
  Misc_feature (329)..(329): location 329 can be a Gap or Phe
  Misc_feature (330)..(330): location 330 can be a Gap or Lys
  Misc_feature (331)..(331): location 331 can be a Gap or Gln
  Misc_feature (332)..(332): location 332 can be a Gap or Glu
  Misc_feature (333)..(333): location 333 can be a Gap or Asp
  Misc_feature (334)..(334): location 334 can be a Gap or Asp or Lys
  Misc_feature (335)..(335): location 335 can be Asn or a Gap or Asp or Ser
  Misc_feature (336)..(336): location 336 can be a Gap or Gln or His
  Misc_feature (337)..(337): location 337 can be a Gap or Ser or Gly or Cys
  Misc_feature (338)..(338): location 338 can be Asn or a Gap or Lys or Ser
  Misc_feature (339)..(339): location 339 can be a Gap or Lys or Phe or Ser
  Misc_feature (340)..(340): location 340 can be a Gap or Asp or Leu
  Misc_feature (341)..(341): location 341 can be Ile or a Gap or Ala or Thr
  Misc_feature (342)..(342): location 342 can be a Gap or Pro or Ser
  Misc_feature (343)..(343): location 343 can be a Gap or Met
  Misc_feature (344)..(344): location 344 can be a Gap or Asp or His
  Misc_feature (345)..(345): location 345 can be a Gap or Lys
  Misc_feature (346)..(346): location 346 can be Asn or a Gap or Thr
  Misc_feature (347)..(347): location 347 can be a Gap or Ser or Arg
XXXXXXXXXXXXXXXXXXXXXXXXXXXXXXXXXXXXXXXXXXSXSSXXXKRTRDPEXXXVYXDNLRSHKRYLSEIMAXSLNGLTVGDSLPXNXXESPARSEXXXXXXXXXXXXXRDDXSXLQYSPMSEDSDXXRFCEXXXXXXXXXXXXXXSXPXSPVSXPXRYQRPXXXXXSXXXXXXXXXXXXXXXXXXXXXXXXXXXXQXRXRXXSDXEGRFPSSPSDICHSXDLRRXALLRSVQMRTQPXXXXSXXXXXXXXXXXXXXXXXXXXXXXXXXXXXDXXXXXXXXXXXXXXXXXXXXXXXXXXXXXXXXXXXXXXXXXXXXXXXXXXXXXXXXXXXXXXXXXXXXX

SEQ ID NO: 30329 - DNA, 11722 bp, artificial
  synthetic pMON93039
cgcgcctgcctgcaggtactcgaggtcattcatatgcttgagaagagagtcgggatagtccaaaataaaacaaaggtaagattacctggtcaaaagtgaaaacatcagttaaaaggtggtataaagtaaaatatcggtaataaaaggtggcccaaagtgaaatttactcttttctactattataaaaattgaggatgtttttgtcggtactttgatacgtcatttttgtatgaattggtttttaagtttattcgcttttggaaatgcatatctgtatttgagtcgggttttaagttcgtttgcttttgtaaatacagagggatttgtataagaaatatctttagaaaaacccatatgctaatttgacataatttttgagaaaaatatatattcaggcgaattctcacaatgaacaataataagattaaaatagctttcccccgttgcagcgcatgggtattttttctagtaaaaataaaagataaacttagactcaaaacatttacaaaaacaacccctaaagttcctaaagcccaaagtgctatccacgatccatagcaagcccagcccaacccaacccaacccaacccaccccagtccagccaactggacaatagtctccacacccccccactatcaccgtgagttgtccgcacgcaccgcacgtctcgcagccaaaaaaaaaaagaaagaaaaaaaagaaaaagaaaaaacagcaggtgggtccgggtcgtgggggccggaaacgcgaggaggatcgcgagccagcgacgaggagcttaggcctcatcgttgaagatgcctctgccgacagtggtcccaaagatggacccccacccacgaggagcatcgtggaaaaagaagacgttccaaccacgtcttcaaagcaagtggattgatgtgatatctccactgacgtaagggatgacgcacaatcccactatccttcgaggcctcatcgttgaagatgcctctgccgacagtggtcccaaagatggacccccacccacgaggagcatcgtggaaaaagaagacgttccaaccacgtcttcaaagcaagtggattgatgtgatatctccactgacgtaagggatgacgcacaatcccactatccttcgaagctccctccctccgcttccaaagaaacgccccccatcgccactatatacatacccccccctctcctcccatccccccaacccttctagaaccatcttccacacactcaagccacactattggagaacacacagggacaacacaccataagatccaagggaggcctccgccgccgccggtaaccaccccgcccctctcctctttctttctccgtttttttttccgtctcggtctcgatctttggccttggtagtttgggtgggcgagaggcggcttcgtgcgcgcccagatcggtgcgcgggaggggcgggatctcgcggctggggctctcgccggcgtggatccggcccggatctcgcggggaatggggctctcggatgtagatctgcgatccgccgttgttgggggagatgatggggggtttaaaatttccgccgtgctaaacaagatcaggaagaggggaaaagggcactatggtttatatttttatatatttctgctgcttcgtcaggcttagatgtgctagatctttctttcttctttttgtgggtagaatttgaatccctcagcattgttcatcggtagtttttcttttcatgatttgtgacaaatgcagcctcgtgcggagcttttttgtaggtagaagcggaccggtcgcgcctcagcagtcgctgtcgttaacccagcggtactcgctgaggcgatcgcgggcccggtaccctgcaatgtgaccctagacttgtccatcttctggattggccaacttaattaatgtatgaaataaaaggatgcacacatagtgacatgctaatcactataatgtgggcatcaaagttgtgtgttatgtgtaattactaattatctgaataagagaaagagatcatccatatttcttatcctaaatgaatgtcacgtgtctttataattctttgatgaaccagatgcattttattaaccaattccatatacatataaatattaatcatatataattaatatcaattgggttagcaaaacaaatctagtctaggtgtgttttgctaattattgggggatagtgcaaaaagaaatctacgttctcaataattcagatagaaaacttaataaagtgagataatttacatagattgcttttatcctttgatatatgtgaaaccatgcatgatataaggaaaatagatagagaaataattttttacatcgttgaatatgtaaacaatttaattcaagaagctaggaatataaatattgaggagtttatgattattattattattttgatgttcaatgaagttttttttaatttcatatgaagtatacaaaaattcttcatagatttttgtttctatgccgtagttatctttaatatatttgtggttgaagaaatttattgctagaaacgaatggattgtcaatttttttttaaagcaaatatatatgaaattatactgtatattattttagtcatgattaaaatgtggccttaattgaatcatctttctcattcattttttcaaaagcatatcaggatgattgatatttatctattttaaaaattaatttaagggttcaaattaaatttaacttaaaagtgtcctaaccgtagttaaaggtttactttaaaaaaatactatgaaaaatctaatcttctatgaatcgacctgcaggatttaaatccatcgttctggggcctaacgggccaagcttactcgaggtcattcatatgcttgagaagagagtcgggatagtccaaaataaaacaaaggtaagattacctggtcaaaagtgaaaacatcagttaaaaggtggtataaagtaaaatatcggtaataaaaggtggcccaaagtgaaatttactcttttctactattataaaaattgaggatgtttttgtcggtactttgatacgtcatttttgtatgaattggtttttaagtttattcgcttttggaaatgcatatctgtatttgagtcgggttttaagttcgtttgcttttgtaaatacagagggatttgtataagaaatatctttagaaaaacccatatgctaatttgacataatttttgagaaaaatatatattcaggcgaattctcacaatgaacaataataagattaaaatagctttcccccgttgcagcgcatgggtattttttctagtaaaaataaaagataaacttagactcaaaacatttacaaaaacaacccctaaagttcctaaagcccaaagtgctatccacgatccatagcaagcccagcccaacccaacccaacccaacccaccccagtccagccaactggacaatagtctccacacccccccactatcaccgtgagttgtccgcacgcaccgcacgtctcgcagccaaaaaaaaaaagaaagaaaaaaaagaaaaagaaaaaacagcaggtgggtccgggtcgtgggggccggaaacgcgaggaggatcgcgagccagcgacgaggccggccctccctccgcttccaaagaaacgccccccatcgccactatatacatacccccccctctcctcccatccccccaaccctaccaccaccaccaccaccacctccacctcctcccccctcgctgccggacgacgagctcctcccccctccccctccgccgccgccgcgccggtaaccaccccgcccctctcctctttctttctccgtttttttttccgtctcggtctcgatctttggccttggtagtttgggtgggcgagaggcggcttcgtgcgcgcccagatcggtgcgcgggaggggcgggatctcgcggctggggctctcgccggcgtggatccggcccggatctcgcggggaatggggctctcggatgtagatctgcgatccgccgttgttgggggagatgatggggggtttaaaatttccgccgtgctaaacaagatcaggaagaggggaaaagggcactatggtttatatttttatatatttctgctgcttcgtcaggcttagatgtgctagatctttctttcttctttttgtgggtagaatttgaatccctcagcattgttcatcggtagtttttcttttcatgatttgtgacaaatgcagcctcgtgcggagcttttttgtaggtagaagtgatcaaccatggcgcaagttagcagaatctgcaatggtgtgcagaacccatctcttatctccaatctctcgaaatccagtcaacgcaaatctcccttatcggtttctctgaagacgcagcagcatccacgagcttatccgatttcgtcgtcgtggggattgaagaagagtgggatgacgttaattggctctgagcttcgtcctcttaaggtcatgtcttctgtttccacggcgtgcatgcttcacggtgcaagcagccggcccgcaaccgcccgcaaatcctctggcctttccggaaccgtccgcattcccggcgacaagtcgatctcccaccggtccttcatgttcggcggtctcgcgagcggtgaaacgcgcatcaccggccttctggaaggcgaggacgtcatcaatacgggcaaggccatgcaggcgatgggcgcccgcatccgtaaggaaggcgacacctggatcatcgatggcgtcggcaatggcggcctcctggcgcctgaggcgccgctcgatttcggcaatgccgccacgggctgccgcctgacgatgggcctcgtcggggtctacgatttcgacagcaccttcatcggcgacgcctcgctcacaaagcgcccgatgggccgcgtgttgaacccgctgcgcgaaatgggcgtgcaggtgaaatcggaagacggtgaccgtcttcccgttaccttgcgcgggccgaagacgccgacgccgatcacctaccgcgtgccgatggcctccgcacaggtgaagtccgccgtgctgctcgccggcctcaacacgcccggcatcacgacggtcatcgagccgatcatgacgcgcgatcatacggaaaagatgctgcagggctttggcgccaaccttaccgtcgagacggatgcggacggcgtgcgcaccatccgcctggaaggccgcggcaagctcaccggccaagtcatcgacgtgccgggcgacccgtcctcgacggccttcccgctggttgcggccctgcttgttccgggctccgacgtcaccatcctcaacgtgctgatgaaccccacccgcaccggcctcatcctgacgctgcaggaaatgggcgccgacatcgaagtcatcaacccgcgccttgccggcggcgaagacgtggcggacctgcgcgttcgctcctccacgctgaagggcgtcacggtgccggaagaccgcgcgccttcgatgatcgacgaatatccgattctcgctgtcgccgccgccttcgcggaaggggcgaccgtgatgaacggtctggaagaactccgcgtcaaggaaagcgaccgcctctcggccgtcgccaatggcctcaagctcaatggcgtggattgcgatgagggcgagacgtcgctcgtcgtgcgtggccgccctgacggcaaggggctcggcaacgcctcgggcgccgccgtcgccacccatctcgatcaccgcatcgccatgagcttcctcgtcatgggcctcgtgtcggaaaaccctgtcacggtggacgatgccacgatgatcgccacgagcttcccggagttcatggacctgatggccgggctgggcgcgaagatcgaactctccgatacgaaggctgcctgatgagctcgaattcccgatcgttcaaacatttggcaataaagtttcttaagattgaatcctgttgccggtcttgcgatgattatcatataatttctgttgaattacgttaagcatgtaataattaacatgtaatgcatgacgttatttatgagatgggtttttatgattagagtcccgcaattatacatttaatacgcgatagaaaacaaaatatagcgcgcaaactaggataaattatcgcgcgcggtgtcatctatgttactagatcggggatgggggatccactagtgatatccgtcgactggtacctacgcgtagctagcccgtgaagtttctcatctaagcccccatttggacgtgaatgtagacacgtcgaaataaagatttccgaattagaataatttgtttattgctttcgcctataaatacgacggatcgtaatttgtcgttttatcaaaatgtactttcattttataataacgctgcggacatctacatttttgaattgaaaaaaaattggtaattactctttctttttctccatattgaccatcatactcattgctgatccatgtagatttcccggacatgaagccatttacaattgaatatatcctgccgccgctgccgctttgcacccggtggagcttgcatgttggtttctacgcagaactgagccggttaggcagataatttccattgagaactgagccatgtgcaccttccccccaacacggtgagcgacggggcaacggagtgatccacatgggacttttcctagcttggctgccatttttggggtgaggccgttcgcggccgaggggcgcagcccctggggggatgggaggcccgcgttagcgggccgggagggttcgagaagggggggcaccccccttcggcgtgcgcggtcacgcgcacagggcgcagccctggttaaaaacaaggtttataaatattggtttaaaagcaggttaaaagacaggttagcggtggccgaaaaacgggcggaaacccttgcaaatgctggattttctgcctgtggacagcccctcaaatgtcaataggtgcgcccctcatctgtcagcactctgcccctcaagtgtcaaggatcgcgcccctcatctgtcagtagtcgcgcccctcaagtgtcaataccgcagggcacttatccccaggcttgtccacatcatctgtgggaaactcgcgtaaaatcaggcgttttcgccgatttgcgaggctggccagctccacgtcgccggccgaaatcgagcctgcccctcatctgtcaacgccgcgccgggtgagtcggcccctcaagtgtcaacgtccgcccctcatctgtcagtgagggccaagttttccgcgaggtatccacaacgccggcggccggccgcggtgtctcgcacacggcttcgacggcgtttctggcgcgtttgcagggccatagacggccgccagcccagcggcgagggcaaccagcccggtgagcgtcggaaagggtcgatcgaccgatgcccttgagagccttcaacccagtcagctccttccggtgggcgcggggcatgactatcgtcgccgcacttatgactgtcttctttatcatgcaactcgtaggacaggtgccggcagcgctctgggtcattttcggcgaggaccgctttcgctggagcgcgacgatgatcggcctgtcgcttgcggtattcggaatcttgcacgccctcgctcaagccttcgtcactggtcccgccaccaaacgtttcggcgagaagcaggccattatcgccggcatggcggccgacgcgctgggctacgtcttgctggcgttcgcgacgcgaggctggatggccttccccattatgattcttctcgcttccggcggcatcgggatgcccgcgttgcaggccatgctgtccaggcaggtagatgacgaccatcagggacagcttcaaggatcgctcgcggctcttaccagcctaacttcgatcattggaccgctgatcgtcacggcgatttatgccgcctcggcgagcacatggaacgggttggcatggattgtaggcgccgccctataccttgtctgcctccccgcgttgcgtcgcggtgcatggagccgggccacctcgacctgaatggaagccggcggcacctcgctaacggattcaccactccaagaattggagccaatcaattcttgcggagaactgtgaatgcgcaaaccaacccttggcagaacatatccatcgcgtccgccatctccagcagccgcacgcggcgcatctcgggcagcgttgggtcctggccacgggtgcgcatgatcgtgctcctgtcgttgaggacccggctaggctggcggggttgccttactggttagcagaatgaatcaccgatacgcgagcgaacgtgaagcgactgctgctgcaaaacgtctgcgacctgagcaacaacatgaatggtcttcggtttccgtgtttcgtaaagtctggaaacgcggaagtcagcgccctgcaccattatgttccggatctgcatcgcaggatgctgctggctaccctgtggaacacctacatctgtattaacgaagcgctggcattgaccctgagtgatttttctctggtcccgccgcatccataccgccagttgtttaccctcacaacgttccagtaaccgggcatgttcatcatcagtaacccgtatcgtgagcatcctctctcgtttcatcggtatcattacccccatgaacagaaatcccccttacacggaggcatcagtgaccaaacaggaaaaaaccgcccttaacatggcccgctttatcagaagccagacattaacgcttctggagaaactcaacgagctggacgcggatgaacaggcagacatctgtgaatcgcttcacgaccacgctgatgagctttaccgcagctgcctcgcgcgtttcggtgatgacggtgaaaacctctgacacatgcagctcccggagacggtcacagcttgtctgtaagcggatgccgggagcagacaagcccgtcagggcgcgtcagcgggtgttggcgggtgtcggggcgcagccatgacccagtcacgtagcgatagcggagtgtatactggcttaactatgcggcatcagagcagattgtactgagagtgcaccatatgcggtgtgaaataccgcacagatgcgtaaggagaaaataccgcatcaggcgctcttccgcttcctcgctcactgactcgctgcgctcggtcgttcggctgcggcgagcggtatcagctcactcaaaggcggtaatacggttatccacagaatcaggggataacgcaggaaagaacatgtgagcaaaaggccagcaaaaggccaggaaccgtaaaaaggccgcgttgctggcgtttttccataggctccgcccccctgacgagcatcacaaaaatcgacgctcaagtcagaggtggcgaaacccgacaggactataaagataccaggcgtttccccctggaagctccctcgtgcgctctcctgttccgaccctgccgcttaccggatacctgtccgcctttctcccttcgggaagcgtggcgctttctcatagctcacgctgtaggtatctcagttcggtgtaggtcgttcgctccaagctgggctgtgtgcacgaaccccccgttcagcccgaccgctgcgccttatccggtaactatcgtcttgagtccaacccggtaagacacgacttatcgccactggcagcagccactggtaacaggattagcagagcgaggtatgtaggcggtgctacagagttcttgaagtggtggcctaactacggctacactagaaggacagtatttggtatctgcgctctgctgaagccagttaccttcggaaaaagagttggtagctcttgatccggcaaacaaaccaccgctggtagcggtggtttttttgtttgcaagcagcagattacgcgcagaaaaaaaggatctcaagaagatcctttgatcttttctacggggtctgacgctcagtggaacgaaaactcacgttaagggattttggtcatgagattatcaaaaaggatcttcacctagatccttttaaattaaaaatgaagttttaaatcaatctaaagtatatatgagtaaacttggtctgacagttaccaatgcttaatcagtgaggcacctatctcagcgatctgtctatttcgttcatccatagttgcctgactccccgtcgtgtagataactacgatacgggagggcttaccatctggccccagtgctgcaatgataccgcgagacccacgctcaccggctccagatttatcagcaataaaccagccagccggaagggccgagcgcagaagtggtcctgcaactttatccgcctccatccagtctattaattgttgccgggaagctagagtaagtagttcgccagttaatagtttgcgcaacgttgttgccattgctgcaggtcgggagcacaggatgacgcctaacaattcattcaagccgacaccgcttcgcggcgcggcttaattcaggagttaaacatcatgagggaagcggtgatcgccgaagtatcgactcaactatcagaggtagttggcgtcatcgagcgccatctcgaaccgacgttgctggccgtacatttgtacggctccgcagtggatggcggcctgaagccacacagtgatattgatttgctggttacggtgaccgtaaggcttgatgaaacaacgcggcgagctttgatcaacgaccttttggaaacttcggcttcccctggagagagcgagattctccgcgctgtagaagtcaccattgttgtgcacgacgacatcattccgtggcgttatccagctaagcgcgaactgcaatttggagaatggcagcgcaatgacattcttgcaggtatcttcgagccagccacgatcgacattgatctggctatcttgctgacaaaagcaagagaacatagcgttgccttggtaggtccagcggcggaggaactctttgatccggttcctgaacaggatctatttgaggcgctaaatgaaaccttaacgctatggaactcgccgcccgactgggctggcgatgagcgaaatgtagtgcttacgttgtcccgcatttggtacagcgcagtaaccggcaaaatcgcgccgaaggatgtcgctgccgactgggcaatggagcgcctgccggcccagtatcagcccgtcatacttgaagctaggcaggcttatcttggacaagaagatcgcttggcctcgcgcgcagatcagttggaagaatttgttcactacgtgaaaggcgagatcaccaaggtagtcggcaaataatgtctaacaattcgttcaagccgacgccgcttcgcggcgcggcttaactcaagcgttagatgctgcaggcatcgtggtgtcacgctcgtcgtttggtatggcttcattcagctccggttcccaacgatcaaggcgagttacatgatcccccatgttgtgcaaaaaagcggttagctccttcggtcctccgatcgaggatttttcggcgctgcgctacgtccgcgaccgcgttgagggatcaagccacagcagcccactcgaccttctagccgacccagacgagccaagggatctttttggaatgctgctccgtcgtcaggctttccgacgtttgggtggttgaacagaagtcattatcgcacggaatgccaagcactcccgaggggaaccctgtggttggcatgcacatacaaatggacgaacggataaaccttttcacgcccttttaaatatccgattattctaataaacgctcttttctcttaggtttacccgccaatatatcctgtcaaacactgatagtttaaactgaaggcgggaaacgacaatctgg

SEQ ID NO: 30330 - DNA, 11375 bp, artificial
  synthetic pMON92705
gtgaagtttctcatctaagcccccatttggacgtgaatgtagacacgtcgaaataaagatttccgaattagaataatttgtttattgctttcgcctataaatacgacggatcgtaatttgtcgttttatcaaaatgtactttcattttataataacgctgcggacatctacatttttgaattgaaaaaaaattggtaattactctttctttttctccatattgaccatcatactcattgctgatccatgtagatttcccggacatgaagccatttacaattgaatatatcctgccgccgctgccgctttgcacccggtggagcttgcatgttggtttctacgcagaactgagccggttaggcagataatttccattgagaactgagccatgtgcaccttccccccaacacggtgagcgacggggcaacggagtgatccacatgggacttttcctagcttggctgccatttttggggtgaggccgttcgcggccgaggggcgcagcccctggggggatgggaggcccgcgttagcgggccgggagggttcgagaagggggggcaccccccttcggcgtgcgcggtcacgcgcacagggcgcagccctggttaaaaacaaggtttataaatattggtttaaaagcaggttaaaagacaggttagcggtggccgaaaaacgggcggaaacccttgcaaatgctggattttctgcctgtggacagcccctcaaatgtcaataggtgcgcccctcatctgtcagcactctgcccctcaagtgtcaaggatcgcgcccctcatctgtcagtagtcgcgcccctcaagtgtcaataccgcagggcacttatccccaggcttgtccacatcatctgtgggaaactcgcgtaaaatcaggcgttttcgccgatttgcgaggctggccagctccacgtcgccggccgaaatcgagcctgcccctcatctgtcaacgccgcgccgggtgagtcggcccctcaagtgtcaacgtccgcccctcatctgtcagtgagggccaagttttccgcgaggtatccacaacgccggcggccggccgcggtgtctcgcacacggcttcgacggcgtttctggcgcgtttgcagggccatagacggccgccagcccagcggcgagggcaaccagcccggtgagcgtcggaaagggtcgatcgaccgatgcccttgagagccttcaacccagtcagctccttccggtgggcgcggggcatgactatcgtcgccgcacttatgactgtcttctttatcatgcaactcgtaggacaggtgccggcagcgctctgggtcattttcggcgaggaccgctttcgctggagcgcgacgatgatcggcctgtcgcttgcggtattcggaatcttgcacgccctcgctcaagccttcgtcactggtcccgccaccaaacgtttcggcgagaagcaggccattatcgccggcatggcggccgacgcgctgggctacgtcttgctggcgttcgcgacgcgaggctggatggccttccccattatgattcttctcgcttccggcggcatcgggatgcccgcgttgcaggccatgctgtccaggcaggtagatgacgaccatcagggacagcttcaaggatcgctcgcggctcttaccagcctaacttcgatcattggaccgctgatcgtcacggcgatttatgccgcctcggcgagcacatggaacgggttggcatggattgtaggcgccgccctataccttgtctgcctccccgcgttgcgtcgcggtgcatggagccgggccacctcgacctgaatggaagccggcggcacctcgctaacggattcaccactccaagaattggagccaatcaattcttgcggagaactgtgaatgcgcaaaccaacccttggcagaacatatccatcgcgtccgccatctccagcagccgcacgcggcgcatctcgggcagcgttgggtcctggccacgggtgcgcatgatcgtgctcctgtcgttgaggacccggctaggctggcggggttgccttactggttagcagaatgaatcaccgatacgcgagcgaacgtgaagcgactgctgctgcaaaacgtctgcgacctgagcaacaacatgaatggtcttcggtttccgtgtttcgtaaagtctggaaacgcggaagtcagcgccctgcaccattatgttccggatctgcatcgcaggatgctgctggctaccctgtggaacacctacatctgtattaacgaagcgctggcattgaccctgagtgatttttctctggtcccgccgcatccataccgccagttgtttaccctcacaacgttccagtaaccgggcatgttcatcatcagtaacccgtatcgtgagcatcctctctcgtttcatcggtatcattacccccatgaacagaaatcccccttacacggaggcatcagtgaccaaacaggaaaaaaccgcccttaacatggcccgctttatcagaagccagacattaacgcttctggagaaactcaacgagctggacgcggatgaacaggcagacatctgtgaatcgcttcacgaccacgctgatgagctttaccgcagctgcctcgcgcgtttcggtgatgacggtgaaaacctctgacacatgcagctcccggagacggtcacagcttgtctgtaagcggatgccgggagcagacaagcccgtcagggcgcgtcagcgggtgttggcgggtgtcggggcgcagccatgacccagtcacgtagcgatagcggagtgtatactggcttaactatgcggcatcagagcagattgtactgagagtgcaccatatgcggtgtgaaataccgcacagatgcgtaaggagaaaataccgcatcaggcgctcttccgcttcctcgctcactgactcgctgcgctcggtcgttcggctgcggcgagcggtatcagctcactcaaaggcggtaatacggttatccacagaatcaggggataacgcaggaaagaacatgtgagcaaaaggccagcaaaaggccaggaaccgtaaaaaggccgcgttgctggcgtttttccataggctccgcccccctgacgagcatcacaaaaatcgacgctcaagtcagaggtggcgaaacccgacaggactataaagataccaggcgtttccccctggaagctccctcgtgcgctctcctgttccgaccctgccgcttaccggatacctgtccgcctttctcccttcgggaagcgtggcgctttctcatagctcacgctgtaggtatctcagttcggtgtaggtcgttcgctccaagctgggctgtgtgcacgaaccccccgttcagcccgaccgctgcgccttatccggtaactatcgtcttgagtccaacccggtaagacacgacttatcgccactggcagcagccactggtaacaggattagcagagcgaggtatgtaggcggtgctacagagttcttgaagtggtggcctaactacggctacactagaaggacagtatttggtatctgcgctctgctgaagccagttaccttcggaaaaagagttggtagctcttgatccggcaaacaaaccaccgctggtagcggtggtttttttgtttgcaagcagcagattacgcgcagaaaaaaaggatctcaagaagatcctttgatcttttctacggggtctgacgctcagtggaacgaaaactcacgttaagggattttggtcatgagattatcaaaaaggatcttcacctagatccttttaaattaaaaatgaagttttaaatcaatctaaagtatatatgagtaaacttggtctgacagttaccaatgcttaatcagtgaggcacctatctcagcgatctgtctatttcgttcatccatagttgcctgactccccgtcgtgtagataactacgatacgggagggcttaccatctggccccagtgctgcaatgataccgcgagacccacgctcaccggctccagatttatcagcaataaaccagccagccggaagggccgagcgcagaagtggtcctgcaactttatccgcctccatccagtctattaattgttgccgggaagctagagtaagtagttcgccagttaatagtttgcgcaacgttgttgccattgctgcaggtcgggagcacaggatgacgcctaacaattcattcaagccgacaccgcttcgcggcgcggcttaattcaggagttaaacatcatgagggaagcggtgatcgccgaagtatcgactcaactatcagaggtagttggcgtcatcgagcgccatctcgaaccgacgttgctggccgtacatttgtacggctccgcagtggatggcggcctgaagccacacagtgatattgatttgctggttacggtgaccgtaaggcttgatgaaacaacgcggcgagctttgatcaacgaccttttggaaacttcggcttcccctggagagagcgagattctccgcgctgtagaagtcaccattgttgtgcacgacgacatcattccgtggcgttatccagctaagcgcgaactgcaatttggagaatggcagcgcaatgacattcttgcaggtatcttcgagccagccacgatcgacattgatctggctatcttgctgacaaaagcaagagaacatagcgttgccttggtaggtccagcggcggaggaactctttgatccggttcctgaacaggatctatttgaggcgctaaatgaaaccttaacgctatggaactcgccgcccgactgggctggcgatgagcgaaatgtagtgcttacgttgtcccgcatttggtacagcgcagtaaccggcaaaatcgcgccgaaggatgtcgctgccgactgggcaatggagcgcctgccggcccagtatcagcccgtcatacttgaagctaggcaggcttatcttggacaagaagatcgcttggcctcgcgcgcagatcagttggaagaatttgttcactacgtgaaaggcgagatcaccaaggtagtcggcaaataatgtctaacaattcgttcaagccgacgccgcttcgcggcgcggcttaactcaagcgttagatgctgcaggcatcgtggtgtcacgctcgtcgtttggtatggcttcattcagctccggttcccaacgatcaaggcgagttacatgatcccccatgttgtgcaaaaaagcggttagctccttcggtcctccgatcgaggatttttcggcgctgcgctacgtccgcgaccgcgttgagggatcaagccacagcagcccactcgaccttctagccgacccagacgagccaagggatctttttggaatgctgctccgtcgtcaggctttccgacgtttgggtggttgaacagaagtcattatcgcacggaatgccaagcactcccgaggggaaccctgtggttggcatgcacatacaaatggacgaacggataaaccttttcacgcccttttaaatatccgattattctaataaacgctcttttctcttaggtttacccgccaatatatcctgtcaaacactgatagtttaaactgaaggcgggaaacgacaatctggcgcgcctgcggccgcctcgaggtcattcatatgcttgagaagagagtcgggatagtccaaaataaaacaaaggtaagattacctggtcaaaagtgaaaacatcagttaaaaggtggtataaagtaaaatatcggtaataaaaggtggcccaaagtgaaatttactcttttctactattataaaaattgaggatgtttttgtcggtactttgatacgtcatttttgtatgaattggtttttaagtttattcgcttttggaaatgcatatctgtatttgagtcgggttttaagttcgtttgcttttgtaaatacagagggatttgtataagaaatatctttaaaaaaacccatatgctaatttgacataatttttgagaaaaatatatattcaggcgaattctcacaatgaacaataataagattaaaatagctttcccccgttgcagcgcatgggtattttttctagtaaaaataaaagataaacttagactcaaaacatttacaaaaacaacccctaaagttcctaaagcccaaagtgctatccacgatccatagcaagcccagcccaacccaacccaacccaacccaccccagtccagccaactggacaatagtctccacacccccccactatcaccgtgagttgtccgcacgcaccgcacgtctcgcagccaaaaaaaaaaaaagaaagaaaaaaaagaaaaagaaaaaacagcaggtgggtccgggtcgtgggggccggaaacgcgaggaggatcgcgagccagcgacgaggccggccctccctccgcttccaaagaaacgccccccatcgccactatatacatacccccccctctcctcccatccccccaaccctaccaccaccaccaccaccacctccacctcctcccccctcgctgccggacgacgagctcctcccccctccccctccgccgccgccgcgccggtaaccaccccgcccctctcctctttctttctccgttttttttttccgtctcggtctcgatctttggccttggtagtttgggtgggcgagaggcggcttcgtgcgcgcccagatcggtgcgcgggaggggcgggatctcgcggctggggctctcgccggcgtggatccggcccggatctcgcggggaatggggctctcggatgtagatctgcgatccgccgttgttgggggagatgatggggggtttaaaatttccgccatgctaaacaagatcaggaagaggggaaaagggcactatggtttatatttttatatatttctgctgcttcgtcaggcttagatgtgctagatctttctttcttctttttgtgggtagaatttgaatccctcagcattgttcatcggtagtttttcttttcatgatttgtgacaaatgcagcctcgtgcggagcttttttgtaggtagaccgcggaccggtcgcgcctcagcagtcgctgtcgttaacccagcggtactcgctgaggcgatcgcgggcccggtaccctgcaatgtgaccctagacttgtccatcttctggattggccaacttaattaatgtatgaaataaaaggatgcacacatagtgacatgctaatcactataatgtgggcatcaaagttgtgtgttatgtgtaattactaattatctgaataagagaaagagatcatccatatttcttatcctaaatgaatgtcacgtgtctttataattctttgatgaaccagatgcattttattaaccaattccatatacatataaatattaatcatatataattaatatcaattgggttagcaaaacaaatctagtctaggtgtgttttgctaattattgggggatagtgcaaaaagaaatctacgttctcaataattcagatagaaaacttaataaagtgagataatttacatagattgcttttatcctttgatatatgtgaaaccatgcatgatataaggaaaatagatagagaaataattttttacatcgttgaatatgtaaacaatttaattcaagaagctaggaatataaatattgaggagtttatgattattattattattttgatgttcaatgaagttttttttaatttcatatgaagtatacaaaaattcttcatagatttttgtttctatgccgtagttatctttaatatatttgtggttgaagaaatttattgctagaaacgaatggattgtcaatttttttttaaagcaaatatatatgaaattatactgtatattattttagtcatgattaaaatgtggccttaattgaatcatctttctcattcattttttcaaaagcatatcaggatgattgatatttatctattttaaaaattaatttaagggttcaaattaaatttaacttaaaagtgtcctaaccgtagttaaaggtttactttaaaaaaatactatgaaaaatctaatcttctatgaatcgacctgcaggatttaaatccatcgttctggggcctaacgggccaagcttactcgaggtcattcatatgcttgagaagagagtcgggatagtccaaaataaaacaaaggtaagattacctggtcaaaagtgaaaacatcagttaaaaggtggtataaagtaaaatatcggtaataaaaggtggcccaaagtgaaatttactcttttctactattataaaaattgaggatgtttttgtcggtactttgatacgtcatttttgtatgaattggtttttaagtttattcgcttttggaaatgcatatctgtatttgagtcgggttttaagttcgtttgcttttgtaaatacagagggatttgtataagaaatatctttagaaaaacccatatgctaatttgacataatttttgagaaaaatatatattcaggcgaattctcacaatgaacaataataagattaaaatagctttcccccgttgcagcgcatgggtattttttctagtaaaaataaaagataaacttagactcaaaacatttacaaaaacaacccctaaagttcctaaagcccaaagtgctatccacgatccatagcaagcccagcccaacccaacccaacccaacccaccccagtccagccaactggacaatagtctccacacccccccactatcaccgtgagttgtccgcacgcaccgcacgtctcgcagccaaaaaaaaaaagaaagaaaaaaaagaaaaagaaaaaacagcaggtgggtccgggtcgtgggggccggaaacgcgaggaggatcgcgagccagcgacgaggccggccctccctccgcttccaaagaaacgccccccatcgccactatatacatacccccccctctcctcccatccccccaaccctaccaccaccaccaccaccacctccacctcctcccccctcgctgccggacgacgagctcctcccccctccccctccgccgccgccgcgccggtaaccaccccgcccctctcctctttctttctccgtttttttttccgtctcggtctcgatctttggccttggtagtttgggtgggcgagaggcggcttcgtgcgcgcccagatcggtgcgcgggaggggcgggatctcgcggctggggctctcgccggcgtggatccggcccggatctcgcggggaatggggctctcggatgtagatctgcgatccgccgttgttgggggagatgatggggggtttaaaatttccgccgtgctaaacaagatcaggaagaggggaaaagggcactatggtttatatttttatatatttctgctgcttcgtcaggcttagatgtgctagatctttctttcttctttttgtgggtagaatttgaatccctcagcattgttcatcggtagtttttcttttcatgatttgtgacaaatgcagcctcgtgcggagcttttttgtaggtagaagtgatcaaccatggcgcaagttagcagaatctgcaatggtgtgcagaacccatctcttatctccaatctctcgaaatccagtcaacgcaaatctcccttatcggtttctctgaagacgcagcagcatccacgagcttatccgatttcgtcgtcgtggggattgaagaagagtgggatgacgttaattggctctgagcttcgtcctcttaaggtcatgtcttctgtttccacggcgtgcatgcttcacggtgcaagcagccggcccgcaaccgcccgcaaatcctctggcctttccggaaccgtccgcattcccggcgacaagtcgatctcccaccggtccttcatgttcggcggtctcgcgagcggtgaaacgcgcatcaccggccttctggaaggcgaggacgtcatcaatacgggcaaggccatgcaggcgatgggcgcccgcatccgtaaggaaggcgacacctggatcatcgatggcgtcggcaatggcggcctcctggcgcctgaggcgccgctcgatttcggcaatgccgccacgggctgccgcctgacgatgggcctcgtcggggtctacgatttcgacagcaccttcatcggcgacgcctcgctcacaaagcgcccgatgggccgcgtgttgaacccgctgcgcgaaatgggcgtgcaggtgaaatcggaagacggtgaccgtcttcccgttaccttgcgcgggccgaagacgccgacgccgatcacctaccgcgtgccgatggcctccgcacaggtgaagtccgccgtgctgctcgccggcctcaacacgcccggcatcacgacggtcatcgagccgatcatgacgcgcgatcatacggaaaagatgctgcagggctttggcgccaaccttaccgtcgagacggatgcggacggcgtgcgcaccatccgcctggaaggccgcggcaagctcaccggccaagtcatcgacgtgccgggcgacccgtcctcgacggccttcccgctggttgcggccctgcttgttccgggctccgacgtcaccatcctcaacgtgctgatgaaccccacccgcaccggcctcatcctgacgctgcaggaaatgggcgccgacatcgaagtcatcaacccgcgccttgccggcggcgaagacgtggcggacctgcgcgttcgctcctccacgctgaagggcgtcacggtgccggaagaccgcgcgccttcgatgatcgacgaatatccgattctcgctgtcgccgccgccttcgcggaaggggcgaccgtgatgaacggtctggaagaactccgcgtcaaggaaagcgaccgcctctcggccgtcgccaatggcctcaagctcaatggcgtggattgcgatgagggcgagacgtcgctcgtcgtgcgtggccgccctgacggcaaggggctcggcaacgcctcgggcgccgccgtcgccacccatctcgatcaccgcatcgccatgagcttcctcgtcatgggcctcgtgtcggaaaaccctgtcacggtggacgatgccacgatgatcgccacgagcttcccggagttcatggacctgatggccgggctgggcgcgaagatcgaactctccgatacgaaggctgcctgatgagctcgaattcccgatcgttcaaacatttggcaataaagtttcttaagattgaatcctgttgccggtcttgcgatgattatcatataatttctgttgaattacgttaagcatgtaataattaacatgtaatgcatgacgttatttatgagatgggtttttatgattagagtcccgcaattatacatttaatacgcgatagaaaacaaaatatagcgcgcaaactaggataaattatcgcgcgcggtgtcatctatgttactagatcggggatgggggatccactagtgatatccgtcgactggtacctacgcgtagctagccc

SEQ ID NO: 30331 - DNA, 9769 bp, artificial
  synthetic pMON82053
ggtccgatgtgagacttttcaacaaagggtaatatccggaaacctcctcggattccattgcccagctatctgtcactttattgtgaagatagtggaaaaggaaggtggctcctacaaatgccatcattgcgataaaggaaaggccatcgttgaagatgcctctgccgacagtggtcccaaagatggacccccacccacgaggagcatcgtggaaaaagaagacgttccaaccacgtcttcaaagcaagtggattgatgtgatggtccgattgagacttttcaacaaagggtaatatccggaaacctcctcggattccattgcccagctatctgtcactttattgtgaagatagtggaaaaggaaggtggctcctacaaatgccatcattgcgataaaggaaaggccatcgttgaagatgcctctgccgacagtggtcccaaagatggacccccacccacgaggagcatcgtggaaaaagaagacgttccaaccacgtcttcaaagcaagtggattgatgtgatatctccactgacgtaagggatgacgcacaatcccactatccttcgcaagacccttcctctatataaggaagttcatttcatttggagaggaccaggtggtaccggcgcgcctcagcagtcgctgtcgttaacccagcggtactcgctgaggcgatcgcgggccctgatcacctgtcgtacagtatttctacatttgatgtgtgatttgtgaagaacatcaaacaaaacaagcactggctttaatatgatgataagtattatggtaattaattaattggcaaaaacaacaatgaagctaaaattttatttattgagccttgcggttaatttcttgtgatgatctttttttttattttctaattatatatagtttcctttgctttgaaatgctaaaggtttgagagagttatgctctttttttcttcctctttcttttttaactttatcatacaaattttgaataaaaatgtgagtacattgagctcatttaaataagcttgatggggatcagattgtcgtttcccgccttcagtttaaactatcagtgtttgacaggatatattggcgggtaaacctaagagaaaagagcgtttattagaataatcggatatttaaaagggcgtgaaaaggtttatccgttcgtccatttgtatgtgcatgccaaccacagggttcccctcgggagtgcttggcattccgtgcgataatgacttctgttcaaccacccaaacgtcggaaagcctgacgacggagcagcattccaaaaagatcccttggctcgtctgggtcggctagaaggtcgagtgggctgctgtggcttgatccctcaacgcggtcgcggacgtagcgcagcgccgaaaaatcctcgatcggaggaccgaaggagctaaccgcttttttgcacaacatgggggatcatgtaactcgccttgatcgttgggaaccggagctgaatgaagccataccaaacgacgagcgtgacaccacgatgcctgcagcatctaacgcttgagttaagccgcgccgcgaagcggcgtcggcttgaacgaattgttagacattatttgccgactaccttggtgatctcgcctttcacgtagtgaacaaattcttccaactgatctgcgcgcgaggccaagcgatcttcttgtccaagataagcctgcctagcttcaagtatgacgggctgatactgggccggcaggcgctccattgcccagtcggcagcgacatccttcggcgcgattttgccggttactgcgctgtaccaaatgcgggacaacgtaagcactacatttcgctcatcgccagcccagtcgggcggcgagttccatagcgttaaggtttcatttagcgcctcaaatagatcctgttcaggaaccggatcaaagagttcctccgccgctggacctaccaaggcaacgctatgttctcttgcttttgtcagcaagatagccagatcaatgtcgatcgtggctggctcgaagatacctgcaagaatgtcattgcgctgccattctccaaattgcagttcgcgcttagctggataacgccacggaatgatgtcgtcgtgcacaacaatggtgacttctacagcgcggagaatctcgctctctccaggggaagccgaagtttccaaaaggtcgttgatcaaagctcgccgcgttgtttcatcaagccttacggtcaccgtaaccagcaaatcaatatcactgtgtggcttcaggccgccatccactgcggagccgtacaaatgtacggccagcaacgtcggttcgagatggcgctcgatgacgccaactacctctgatagttgagtcgatacttcggcgatcaccgcttccctcatgatgtttaactcctgaattaagccgcgccgcgaagcggtgtcggcttgaatgaattgttaggcgtcatcctgtgctcccgacctgcagcaatggcaacaacgttgcgcaaactattaactggcgaactacttactctagcttcccggcaacaattaatagactggatggaggcggataaagttgcaggaccacttctgcgctcggcccttccggctggctggtttattgctgataaatctggagccggtgagcgtgggtctcgcggtatcattgcagcactggggccagatggtaagccctcccgtatcgtagttatctacacgacggggagtcaggcaactatggatgaacgaaatagacagatcgctgagataggtgcctcactgattaagcattggtaactgtcagaccaagtttactcatatatactttagattgatttaaaacttcatttttaatttaaaaggatctaggtgaagatcctttttgataatctcatgaccaaaatcccttaacgtgagttttcgttccactgagcgtcagaccccgtagaaaagatcaaaggatcttcttgagatcctttttttctgcgcgtaatctgctgcttgcaaacaaaaaaaccaccgctaccagcggtggtttgtttgccggatcaagagctaccaactctttttccgaaggtaactggcttcagcagagcgcagataccaaatactgtccttctagtgtagccgtagttaggccaccacttcaagaactctgtagcaccgcctacatacctcgctctgctaatcctgttaccagtggctgctgccagtggcgataagtcgtgtcttaccgggttggactcaagacgatagttaccggataaggcgcagcggtcgggctgaacggggggttcgtgcacacagcccagcttggagcgaacgacctacaccgaactgagatacctacagcgtgagctatgagaaagcgccacgcttcccgaagggagaaaggcggacaggtatccggtaagcggcagggtcggaacaggagagcgcacgagggagcttccagggggaaacgcctggtatctttatagtcctgtcgggtttcgccacctctgacttgagcgtcgatttttgtgatgctcgtcaggggggcggagcctatggaaaaacgccagcaacgcggcctttttacggttcctggccttttgctggccttttgctcacatgttctttcctgcgttatcccctgattctgtggataaccgtattaccgcctttgagtgagctgataccgctcgccgcagccgaacgaccgagcgcagcgagtcagtgagcgaggaagcggaagagcgcctgatgcggtattttctccttacgcatctgtgcggtatttcacaccgcatatggtgcactctcagtacaatctgctctgatgccgcatagttaagccagtatacactccgctatcgctacgtgactgggtcatggctgcgccccgacacccgccaacacccgctgacgcgccctgacgggcttgtctgctcccggcatccgcttacagacaagctgtgaccgtctccgggagctgcatgtgtcagaggttttcaccgtcatcaccgaaacgcgcgaggcagctgcggtaaagctcatcagcgtggtcgtgaagcgattcacagatgtctgcctgttcatccgcgtccagctcgttgagtttctccagaagcgttaatgtctggcttctgataaagcgggccatgttaagggcggttttttcctgtttggtcactgatgcctccgtgtaagggggatttctgttcatgggggtaatgataccgatgaaacgagagaggatgctcacgatacgggttactgatgatgaacatgcccggttactggaacgttgtgagggtaaacaactggcggtatggatgcggcgggaccagagaaaaatcactcagggtcaatgccagcgcttcgttaatacagatgtaggtgttccacagggtagccagcagcatcctgcgatgcagatccggaacataatggtgcagggcgctgacttccgcgtttccagactttacgaaacacggaaaccgaagaccattcatgttgttgctcaggtcgcagacgttttgcagcagcagtcgcttcacgttcgctcgcgtatcggtgattcattctgctaaccagtaaggcaaccccgccagcctagccgggtcctcaacgacaggagcacgatcatgcgcacccgtggccaggacccaacgctgcccgagatgcgccgcgtgcggctgctggagatggcggacgcgatggatatgttctgccaagggttggtttgcgcattcacagttctccgcaagaattgattggctccaattcttggagtggtgaatccgttagcgaggtgccgccggcttccattcaggtcgaggtggcccggctccatgcaccgcgacgcaacgcggggaggcagacaaggtatagggcggcgcctacaatccatgccaacccgttccatgtgctcgccgaggcggcataaatcgccgtgacgatcagcggtccaatgatcgaagttaggctggtaagagccgcgagcgatccttgaagctgtccctgatggtcgtcatctacctgcctggacagcatggcctgcaacgcgggcatcccgatgccgccggaagcgagaagaatcataatggggaaggccatccagcctcgcgtcgcgaacgccagcaagacgtagcccagcgcgtcggccgccatgccggcgataatggcctgcttctcgccgaaacgtttggtggcgggaccagtgacgaaggcttgagcgagggcgtgcaagattccgaataccgcaagcgacaggccgatcatcgtcgcgctccagcgaaagcggtcctcgccgaaaatgacccagagcgctgccggcacctgtcctacgagttgcatgataaagaagacagtcataagtgcggcgacgatagtcatgccccgcgcccaccggaaggagctgactgggttgaaggctctcaagggcatcggtcgatcgaccctttccgacgctcaccgggctggttgccctcgccgctgggctggcggccgtctatggccctgcaaacgcgccagaaacgccgtcgaagccgtgtgcgagacaccgcggccggccgccggcgttgtggatacctcgcggaaaacttggccctcactgacagatgaggggcggacgttgacacttgaggggccgactcacccggcgcggcgttgacagatgaggggcaggctcgatttcggccggcgacgtggagctggccagcctcgcaaatcggcgaaaacgcctgattttacgcgagtttcccacagatgatgtggacaagcctggggataagtgccctgcggtattgacacttgaggggcgcgactactgacagatgaggggcgcgatccttgacacttgaggggcagagtgctgacagatgaggggcgcacctattgacatttgaggggctgtccacaggcagaaaatccagcatttgcaagggtttccgcccgtttttcggccaccgctaacctgtcttttaacctgcttttaaaccaatatttataaaccttgtttttaaccagggctgcgccctgtgcgcgtgaccgcgcacgccgaaggggggtgcccccccttctcgaaccctcccggcccgctaacgcgggcctcccatccccccaggggctgcgcccctcggccgcgaacggcctcaccccaaaaatggcagccaagctaggaaaagtcccatgtggatcactccgttgccccgtcgctcaccgtgttggggggaaggtgcacatggctcagttctcaatggaaattatctgcctaaccggctcagttctgcgtagaaaccaacatgcaagctccaccgggtgcaaagcggcagcggcggcaggatatattcaattgtaaatggcttcatgtccgggaaatctacatggatcagcaatgagtatgatggtcaatatggagaaaaagaaagagtaattaccaattttttttcaattcaaaaatgtagatgtccgcagcgttattataaaatgaaagtacattttgataaaacgacaaattacgatccgtcgtatttataggcgaaagcaataaacaaattattctaattcggaaatctttatttcgacgtgtctacattcacgtccaaatgggggcttagatgagaaacttcacgatcgatgcggccaccactcgagaagcttactagtcaacaattggccaatctttgttctaaattgctaataaacgaccatttccgtcaattctccttggttgcaacagtctacccgtcaaatgtttactaatttataagtgtgaagtttgaattatgaaagacgaaatcgtattaaaaattcacaagaataaacaactccatagattttcaaaaaaacagtcacgagaaaaaaaccacagtccgtttgtctgctcttctagtttttattatttttctattaatagttttttgttatttcgagaataaaatttgaacgatgtccgaaccacaaaagccgagccgataaatcctaagccgagcctaactttagccgtaaccatcagtcacggctcccgggctaattcatttgaaccgaatcataatcaacggtttagatcaaactcaaaacaatctaacggcaacatagacgcgtcggtgagctaaaaagagtgtgaaagccaggtcaccatagcattgtctctcccagattttttatttgggaaataatagaagaaatagaaaaaaataaaagagtgagaaaaatcgtagagctatatattcgcacatgtactcgtttcgctttccttagtgttagctgctgccgctgttgtttctcctccatttctctatctttctctctcgctgcttctcgaatcttctgtatcatcttcttcttcttcaaggtgagtctctagatccgttcgcttgattttgctgctcgttagtcgttattgttgattctctatgccgatttcgctagatctgtttagcatgcgttgtggttttatgagaaaatctttgttttgggggttgcttgttatgtgattcgatccgtgcttgttggatcgatctgagttaattcttaaggtttatgtgttagatctatggagtttgaggattcttctcgcttctgtcgatctctcgctgttatttttgtttttttcagtgaagtgaagttgtttagttcgaaatgacttcgtgtatgctcgattgatctggttttaatcttcgatctgttaggtgttgatgtttacaagtgaattctagtgttttctcgttgagatctgtgaagtttgaacctagttttctcaataatcaacatatgaagcgatgtttgagtttcaataaacgctgctaatcttcgaaactaagttgtgatctgattcgtgtttacttcatgagcttatccaattcatttcggtttcattttactttttttttagtgaaccatggcgcaagttagcagaatctgcaatggtgtgcagaacccatctcttatctccaatctctcgaaatccagtcaacgcaaatctcccttatcggtttctctgaagacgcagcagcatccacgagcttatccgatttcgtcgtcgtggggattgaagaagagtgggatgacgttaattggctctgagcttcgtcctcttaaggtcatgtcttctgtttccacggcgtgcatgcttcatggagcttcatctaggccagctactgccaggaagtctagcgggctcagtggcaccgtgcgcatccctggcgataaaagtatttcacacaggagcttcatgttcggaggacttgctagtggagagacgagaatcactggtttgcttgagggcgaagatgttatcaacaccggtaaggcgatgcaagcaatgggtgccagaatccgaaaagagggcgatacgtggatcatcgacggtgttggtaacggaggattgctcgctcccgaagcgccacttgactttgggaacgcagctacggggtgccgtcttactatgggactggtaggcgtgtatgactttgactctaccttcatcggtgacgcgagcctcactaagagaccaatgggacgagtgctgaatcccctgagggagatgggtgtccaggtgaaatctgaggatggtgatcgtcttccggttactctgcgaggccccaagacccccacgccaatcacgtacagggttccgatggcgtcagcacaggtcaagtcagcggtactcctggcgggcctcaacacacctggaatcacaaccgtgattgaacccatcatgactagagaccacacggagaagatgttgcagggtttcggcgctaatctaacggtcgaaaccgacgccgacggcgtgaggacaatccgcttggagggcagaggtaaactgactggccaagtcatcgatgtgcctggagatccctcgtccacagcgtttcccctcgtagctgcgttgctcgtccctggatctgatgtgacgatcctgaatgtcctcatgaatccaactagaaccggcctcatcctcacattgcaggagatgggtgctgacatcgaggttatcaatcctaggttggcaggtggagaggatgtggccgatctgcgcgtgcgttctagtacactcaaaggcgtgaccgtccctgaggatcgcgctccatccatgatcgacgagtaccccattctcgccgttgctgctgcgtttgccgagggcgcaactgtaatgaacggccttgaggagttgagggttaaggagagtgacaggctgtccgcggtggcgaatggcctgaagctaaacggcgtggactgcgacgaaggtgaaacgtcccttgtagtccgtggtcgcccagacgggaaggggttggggaatgcttcgggagctgctgtggcgacgcaccttgatcatagaatcgccatgtcatttctggtgatgggacttgtctccgagaatccggtgaccgttgacgatgctaccatgatcgccacctcctttcctgagttcatggacctcatggcaggcttgggggccaagatcgagctgtctgatactaaggccgcttgaattcccgatcgttcaaacatttggcaataaagtttcttaagattgaatcctgttgccggtcttgcgatgattatcatataatttctgttgaattacgttaagcatgtaataattaacatgtaatgcatgacgttatttatgagatgggtttttatgattagagtcccgcaattatacatttaatacgcgatagaaaacaaaatatagcgcgcaaactaggataaattatcgcgcgcggtgtcatctatgttactagatcggggatcccacgtgcggaccgcctgcaggccgcgttatcaagctaactgca

SEQ ID NO: 30332 - DNA, 613 bp, Cauliflower mosaic virus
ggtccgatgtgagacttttcaacaaagggtaatatccggaaacctcctcggattccattgcccagctatctgtcactttattgtgaagatagtggaaaaggaaggtggctcctacaaatgccatcattgcgataaaggaaaggccatcgttgaagatgcctctgccgacagtggtcccaaagatggacccccacccacgaggagcatcgtggaaaaagaagacgttccaaccacgtcttcaaagcaagtggattgatgtgatggtccgattgagacttttcaacaaagggtaatatccggaaacctcctcggattccattgcccagctatctgtcactttattgtgaagatagtggaaaaggaaggtggctcctacaaatgccatcattgcgataaaggaaaggccatcgttgaagatgcctctgccgacagtggtcccaaagatggacccccacccacgaggagcatcgtggaaaaagaagacgttccaaccacgtcttcaaagcaagtggattgatgtgatatctccactgacgtaagggatgacgcacaatcccactatccttcgcaagacccttcctctatataaggaagttcatttcatttggagagg

SEQ ID NO: 30333 - DNA, 537 bp, Arabidopsis thaliana
actaaatctagccttttcagaccggacatgaacttcgcatattggcgtaactgtgcagttttacctttttcggatcagacaagatcagatttagaccacccaacaatagtcagtcatatttgacaacctaagctagccgacactactaaaaagcaaacaaaagaagaattctatgttgtcattttaccggtggcaagtggacccttctataaaagagtaaagagacagcctgtgtgtgtataatctctaattatgttcaccgacacaatcacacaaacccttctctaatcacacaacttcttcatgatttacgacattaattatcattaactctttaaattcactttacatgctcaaaaatatctaatttgcagcattaatttgagtaccgataactattattataatcgtcgtgattcgcaatcttcttcattagatgctgtcaagttgtactcgcacgcggtggtccagtgaagcaaatccaacggtttaaaaccttcttacatttctagatctaatctgaaccgtcagatatct

SEQ ID NO: 30334 - DNA, 1468 bp, Arabidopsis thaliana
taaacaggtacaggtgtcccatgcttattctcttgatagtaacatgtgtcctatgttgagtcaattctacgttcgaagaagtgctaacaattgttaatagcctcgtatattattctaattaaaatgcctcgatagatttggttagtggtctgaatgtgattggttattttttcaagtggcaagaggtctaccatctaatattacaatcaatcgaccaaaaaggtcgagaacatgataatggtggcaaatacaaatggttcattgttgtctaatataacaagccatcagttgtcactttttaaaaacaatacagaatacaagatacttttttttaaggtagaatgtgtgtttaatattttcgtttatataacaaataaacagttacatgttttactctatgattatatttatgacatttttcttcttcttaacaacatttttttcccataagaacatttacaatagtattaaaactttgattgcaatcaaatgttagatcacttattataaaattactaagactgctatcttttcctattgacaaaagcgaatccaatatatgttactgaaacaaatgcgtaaattatactatatggagatctatcggttaattattgagagaatctaagaaagtttttgagtacaacagtcctaataatatcttcacataccatataatatacatatatacatatacacaaatgtactctttaaaccaacatcagcatacgtatatcccatcaggaaacttagacttttgggaattcatggtatgaaaaccaaaaccaaatgacaacattcgatttgatactcccgacccatggtaaagaaataacaaattccaatatatctttcactggactttccgaggcacattccggttttctccatttcaagaaattgtcaaaaataaattgagatccggtttattacctcaaaaaagaagaagagaaattacaacattaatttccgaaaaggcataaatgagaaatcatatttcagcagaagaacacaaaagagttaagaacccacagatcacacaacctctgtccatgtctgctttttacacttttttaaaataagtttctcctaaaaagttatttcctatttataataatttccttagatttatcttcctggtctctcttctgctgcttccctctcccccataactatcactatttagaattttcaatgtggaaaaggaagctgattgttgaagcataaatcccgggagaccacttttgcattttcaaataattaaattaaaccatagatacacacacacagttacttactcttttagggtttcccaataaatttatagtactttaatgtgtttcatgatattgatgataaatgctagctgtatttacaatgggggctcctctttttttttctttatgttattttcattttttatttctcatagctatatagcaaagccaaagtgaataataatactagt

SEQ ID NO: 30335 - DNA, 841 bp, Oryza sativa
tcgaggtcattcatatgcttgagaagagagtcgggatagtccaaaataaaacaaaggtaagattacctggtcaaaagtgaaaacatcagttaaaaggtggtataaagtaaaatatcggtaataaaaggtggcccaaagtgaaatttactcttttctactattataaaaattgaggatgtttttgtcggtactttgatacgtcatttttgtatgaattggtttttaagtttattcgcttttggaaatgcatatctgtatttgagtcgggttttaagttcgtttgcttttgtaaatacagagggatttgtataagaaatatctttagaaaaacccatatgctaatttgacataatttttgagaaaaatatatattcaggcgaattctcacaatgaacaataataagattaaaatagctttcccccgttgcagcgcatgggtattttttctagtaaaaataaaagataaacttagactcaaaacatttacaaaaacaacccctaaagttcctaaagcccaaagtgctatccacgatccatagcaagcccagcccaacccaacccaacccaacccaccccagtccagccaactggacaatagtctccacacccccccactatcaccgtgagttgtccgcacgcaccgcacgtctcgcagccaaaaaaaaaaagaaagaaaaaaaagaaaaagaaaaaacagcaggtgggtccgggtcgtgggggccggaaacgcgaggaggatcgcgagccagcgacgaggccggccctccctccgcttccaaagaaacgccccccatcgccactatatacatacccccccctctcctcccatccccccaaccct

SEQ ID NO: 30336 - DNA, 1180 bp, Zea mays
acttaaaaatcaacaatatcttcacatgacttaattataatgtcttgcttgagacgttgtttttgctactacataagataaagttcaaataaatgcatggtggagttcagcctaggcaaagtgatggtccgaatgattaacaccccaagcaagacattataagtcatgtgaagatctgcaagacgtgctaagagtctctgacacaccaacaagtggaagcccgaacaaacaaaaacgaagccatcaaagttgagataaagaggtggataaattgaaaattgtctcatgattttggatatactcaaatcgacatgacttcatctctaaactatagaacttttgatttgcttttcaaaaagtccaagatcaacaaaacgtgttggtgggtgcgggtttggttcttaacccaataggttttttctcgtgtgtatgaaaaggttgtacccatgtgtgaccgagccagacaggggtacgggcaaaccgaagggaaaccacttaggtggatcccttggctagcctgagactgacacaccataagtgatcggccgcttttaactacgcctggtgccgagccacaatagagatgtcggtctgtctcccacttatgacctacgaacccctcgtactatggctcatctatgggtcgtgtgccccttggcttactgcgcactcatgccctatcaaggctaggccagagtgcgtaggccgctttcagagatcactcggtgaaaaaatcactcggtgatgaaaccggcgaactgtcgttgggtgggtgggtcttactatcaaagaaaacgtattccagcaaacgtattccactctccacaaaataaacatttctgttcggttacctaggtgaggcatcctgtaagaacttggctgtgtttagtcacagcaaacgtataccactctccacaaaataaaataaaaaacgggtcagtgaagctgcaattaatcccttctcttgcttgctggttgctgccagggaaatggcattagtgtttgttcccgttccgaagaccgcagcaacccccggaatcggaaacgcctgccccctgcagcaccaaagaccgtaccaacccccgcaatcgcagttcgcaaaccaaactaatttgtgtacacaaaccggccccgtctcggttctattctataaaacccccgccagaccgctggcttgttc

SEQ ID NO: 30337 - DNA, 1832 bp, Oryza sativa
cctctgttttgtttttcaccctcaatatttggaaacatttatctaggttgtttgtgtccaggcctataaatcatacatgatgttgtcgtattggatgtgaatgtggtggcgtgttcagtgccttggatttgagtttgatgagagttgcttctgggtcaccactcaccattatcgatgctcctcttcagcataaggtaaaagtcttccctgtttacgttattttacccactatggttgcttgggttggttttttcctgattgcttatgccatggaaagtcatttgatatgttgaacttgaattaactgtagaattgtatacatgttccatttgtgttgtacttccttcttttctattagtagcctcagatgagtgtgaaaaaaacagattatataacttgccctataaatcatttgaaaaaaatattgtacagtgagaaattgatatatagtgaatttttaagagcatgttttcctaaagaagtatatattttctatgtacaaaggccattgaagtaattgtagatacaggataatgtagactttttggacttacactgctacctttaagtaacaatcatgagcaatagtgttgcaatgatatttaggctgcattcgtttactctcttgatttccatgagcacgcttcccaaactgttaaactctgtgttttttgccaaaaaaaaatgtataggaaagttgcttttaaaaaatcatatcaatccattttttaagttatagctaatacttaattaatcatgcgctaataagtcactctgtttttcgtactagagagattgttttgaaccagcactcaagaacacagccttaacccagccaaataatgctacaacctaccagtccacacctcttgtaaagcatttgttgcatggaaaagctaagatgacagcaacctgttcaggaaaacaactgacaaggtcatagggagagggagcttttggaaaggtgccgtgcagttcaaacaattagttagcagtagggtgttggtttttgctcacagcaataagaagttaatcatggtgtaggcaacccaaataaaacaccaaaatatgcacaaggcagtttgttgtattctgtagtacagacaaaactaaaagtaatgaaagaagatgtggtgttagaaaaggaaacaatatcatgagtaatgtgtgagcattatgggaccacgaaataaaaagaacattttgatgagtcgtgtatcctcgatgagcctcaaaagttctctcaccccggataagaaacccttaagcaatgtgcaaagtttgcattctccactgacataatgcaaaataagatatcatcgatgacatagcaactcatgcatcatatcatgcctctctcaacctattcattcctactcatctacataagtatcttcagctaaatgttagaacataaacccataagtcacgtttgatgagtattaggcgtgacacatgacaaatcacagactcaagcaagataaagcaaaatgatgtgtacataaaactccagagctatatgtcatattgcaaaaagaggagagcttataagacaaggcatgactcacaaaaattcatttgcctttcgtgtcaaaaagaggagggctttacattatccatgtcatattgcaaaagaaagagagaaagaacaacacaatgctgcgtcaattatacatatctgtatgtccatcattattcatccacctttcgtgtaccacacttcatatatcatgagtcacttcatgtctggacattaacaaactctatcttaacatttagatgcaagagcctttatctcactataaatgcacgatgatttctcattgtttctc

SEQ ID NO: 30338 - DNA, 1456 bp, Zea mays
tgtttggactccagaaaatttacgggagttggtggagcaggtcattaagtactataaaaaatcatgtagctgaagctgcaagtatttagaagacatttagataagttattttatttatcatttagattaagaaaatttaaaactatttaaattgatattataaactacagctccacactggagctagatcctggagtcattacaaacacccccttaatgggaaaagagaagataatgtatatctaattattgtttctgtgtcacctatagctattagttcaaaacttcataatcactggtacaaataagctctagagaggcggttcggaacccatttttattgttgtttttcaaaaccactagtgttagggaccgccagtggaaactgaaacgccattggaaattgattttcactgatggtgagctaagaaaaccgccattggtaatcctttgcagaaaacataaactaggttttaaaaatagtaaacaaatatttttattaggagaggccccacatagtcgcaccatttttcgcgcattattcacgcgctacgcaaccaatggtaattgaacctcagagacttcactcttgtgtagcctcctttgccactccactaaacacttacttgtgtcttgattgcattttgttgcccacatattagaacaaacagagtgtaaattgattgtttgaggctgtaaacaaattcaaatgaaaaagtagtcaactactaaattgaataattgtttatgttctaccacttttattttggtacttttcccatcggaggcggtttgtaaaatttgcattttaagttttacaaatttcaatgaaattttgagagcccaaatgatttcaaataaaaaagttgtcaactacaatgttttataacttttaatttggtggttttttaaacaagctcatttgaaaaactaaaatgatcgattctacatgatttttaggtcgattttttaaggaatcgcctgtacaaatatttctactgacagtttttaagaaaccacctgtggaaatcatagatttgtactagcggtttttctcaagtaactgctagtagaaatatggtggttttcttaagaaaactgtttgtaggaatgcacgatttatataaatggatttgttaagaaaaccgctagtggaatgttctttcaactaacggttattgagtcgtgacagccaatttaatttccttgataactaaaagcggctgtaaaaattagaccatgatgtaggcacggagctgttttgtactgaatgcgcccactgttttgttggaaaagtgcatgtacttattattcattctgtttatttctagctggcattcagttcttacagccacagattatgcaaaacgcctatttctgccagcaaatttacaggaaaagtcatggacttttccgggttattttcctataagtacagccattcctttcacttaca

SEQ ID NO: 30339 - DNA, 726 bp, Rice tungro bacilliform virus
tcctacaaaagggagtagtaatatttaatgagcttgaaggaggatatcaactctctccaaggtttattggagacctttatgctcatggttttattaaacaaataaacttcacaaccaaggttcctgaagggctaccgccaatcatagcggaaaaacttcaagactataagttccctggatcaaataccgtcttaatagaacgagagattcctcgctggaacttcaatgaaatgaaaagagaaacacagatgaggaccaacttatatatcttcaagaattatcgctgtttctatggctattcaccattaaggccatacgaacctataactcctgaagaatttgggtttgattactacagttgggaaaatatggttgatgaagacgaaggagaagttgtatacatctccaagtatactaagattatcaaagtcactaaagagcatgcatgggcttggccagaacatgatggagacacaatgtcctgcaccacatcaatagaagatgaatggatccatcgtatggacaatgcttaaagaagctttatcaaaagcaactttaagtacgaatcaataaagaaggaccagaagatataaagcgggaacatcttcacatgctaccacatggctagcatctttactttagcatctctattattgtaagagtgtataatgaccagtgtgcccctggactccagtatataaggagcaccagagtagtgtaatagat

SEQ ID NO: 30340 - DNA, 838 bp, Hordeum vulgare subsp. vulgare
catcgattttaaaaaaaagttcatacctttcaaaaacgttcatcaatttttttaaaaagttcactaaaaatgaaaaaaagttcatccaatttaaaaaaagttcattaattttttataaatttcaataaatttgaaaaaacttcataaaattcaacaaaagttcattgaagtgaaaaaagctcataaatctttaaaaagtgcatccattttcaaaaagatgttcatcaaaattcaatatagttcaccaatattcaaaaaagttcattaatcttaaaaaatattcgctaaaatttaaaaaatgtttatcaatatttaaacggcgtctagatgagccggtctatttacaaacaccataggcgccaattaacaaaaatgcacgttagatcacgtctacggcgtcaaataggaaatgcccatcggccttactattaagagttgttttggttatcctttaggatttatgctgtgggctggacttaacacaaaacccacagccatggtaggccggaatctattattcagctcacaaacgatgttctactcaaaagaagaaaaaaatctgttgtcagaaaaagagaacaaaaaaggctcacgaacatgccgcggctcgcacaggtggccgtgagcttctgaatgacttggccacccggcatgtccactgcccccctagacggtgtgggtgggtggacaggtcaagcgcattgaacaaggtcaccctgcgttctgccacgaggccaactgcgtggccctcatgcaacgcgccttgctgccacttctacacacgccctcgccggccgaccgctgctataaaagcagctccccgttgcgtcctcgacgg

SEQ ID NO: 30341 - DNA, 1160 bp, Zea mays
atgtgctggtgccccataaggtaggcacctaggtctgtgtttgaagcatcgacagatttgtaaacatgttcctatgaacctatttctgattgataatttgtcaaaactcatcatttgtcttcatccttgcctgcttgcgttcacgtgacaaagtacgtgtatgtcttcggcctttgctgtgtatgtttcgcattgcttagatgtggtgaaagaacatcagaagatgcattgatggcgtgcttaaaccagtgatgtgctccaggtgttcctgcagtctgcagagatatttactcttgtagtcttgttgacagcacagttgtatgtgatttcttggatgtaatgtaaaccaaatgaaagataggaacagttcgtcctcttccgtatacgaaggtcactgtatcatttgtcgtggcacaagatgatctgcaggcaggactgcaacatggtttcttggactgtcctgaatgcccgttcttgttctttagttgagccagagcagcagcctggtgtcggtgcctgagacctgacgaagcacacggcaaacaaacaagtcgcagcagctagcaggggcgttgccatcgccacaagcccccaagagacccgccgaggaaaagaaaaaaaaactacggccgccgttgccaagccgagcgtgcgaaccgatccacggatgggagatcagagatcacccaccgcaggcgggcggcagtggctggcgaggtgcgtccacagaacctgctgcaggtccctgtccgtcccggcgaccccttttctaggcgagcaactccccatggcagagctgcacgcagcagggcccgtcgttggttgcagctttaaccctttttgttttaaccatacaatgcagagtcgcagaggtgaaacaggacggaaattacagaaaagatggtggtgtgccagcagccccagcatgaagaagatcaggacaaaagaaaagcttgtgattggtgacagcaacaggattggattggagccaagctaggcagtgagaggcaggcagcaagacgcgtcagccactgaaatccagagggcaacctcggcctcacaactcatatccccttgtgctgttgcgcgccgtggttagccaggtgtgctgcaggcctcctccttgtttatatatgggagatgctctcaccctctaaggt

SEQ ID NO: 30342 - DNA, 816 bp, Zea mays
cagatccacgctcgctcgggtgtcgggtcagatcgatccagttggcgcacgtaataatccttttccccagaaggagtcgaacccctcctccccgtccaatccaatcaaagcgaccaatcgactggctgtcctacacacacacaaaaccgaccgaggcgacacaccgcagcagtgatcattctgagcatttgcagaaaaaggagaacgtcccgaaatcctggtggttgtattgtgtgattgctcactcagtccgtgcagggtcagggtgaagccaagccaacaacccaacgctcgctgggagtagggtccaccggatttattggcagtacatcgctgtttggtcctcctgcccttcgcttattttttaattcggcagacgtgcacagacagggcaccaccggaccaaggaagggcgcacaccgtcgtcagtcaccaggtgggtgtgatcagcagccgcttctcttgtgctgctttatagcgtatgaaattccagtgtccctgttccacctgcatgcaattggtttgactgaacaacatgatagcaagtgatactatatatatttttatagaggaacacagtgaaaaaatatttagtattattacgtgcatgaaattgtattcacagttatccctgatgcaacgcaattgttcaatatatagcagtatatattatacgaagtatatatgtatatctaattttatgagaccgggagaaggtgtattcacagtacagtgcagggccatggccatgcagcccttggggcctgaaaagggtcgcgtgaagtggccaacgctgtgcaattgcaaccaaacaaa

SEQ ID NO: 30343 - DNA, 469 bp, Zea  mays
ggtactcctgagatactataccctcctgttttaaaatagttggcattatcgaattatcattttactttttaatgttttctcttcttttaatatattttatgaattttaatgtattttaaaatgttatgcagttcgctctggacttttctgctgcgcctacacttgggtgtactgggcctaaattcagcctgaccgaccgcctgcattgaataatggatgagcaccggtaaaatccgcgtacccaactttcgagaagaaccgagacgtggcgggccgggccaccgacgcacggcaccagcgactgcacacgtcccgccggcgtacgtgtacgtgctgttccctcactggccgcccaatccactcatgcatgcccacgtacacccctgccgtggcgcgcccagatcctaatcctttcgccgttctgcacttctgctgcctataaatggcggcatcgaccgtcacctgcttc

SEQ ID NO: 30344 - DNA, 1039 bp, Zea mays
gtcccgcgtcaatattattaaaaaactcctacatttctttataatcaacccgcactcttataatctcttctctactactataataagagagtttatgtacaaaataaggtgaaattatgtataagtgttctggatattggttgttggctccatattcacacaacctaatcaatagaaaacatatgttttattaaaacaaaatttatcatatatcatatatatatatatacatatatatatatatatataaaccgtagcaatgcacgggcatataactagtgcaacttaatacatgtgtgtattaagatgaataagagggtatccaaataaaaaacttgttcgcttacgtctggatcgaaaggggttggaaacgattaaatctcttcctagtcaaaattgaatagaaggagatttaatctctcccaatccccttcgatcatccaggtgcaaccgtataagtcctaaagtggtgaggaacacgaaacaaccatgcattggcatgtaaagctccaagaatttgttgtatccttaacaactcacagaacatcaaccaaaattgcacgtcaagggtattgggtaagaaacaatcaaacaaatcctctctgtgtgcaaagaaacacggtgagtcatgccgagatcatactcatctgatatacatgcttacagctcacaagacattacaaacaactcatattgcattacaaagatcgtttcatgaaaaataaaataggccggacaggacaaaaatccttgacgtgtaaagtaaatttacaacaaaaaaaaagccatatgtcaagctaaatctaattcgttttacgtagatcaacaacctgtagaaggcaacaaaactgagccacgcagaagtacagaatgattccagatgaaccatcgacgtgctacgtaaagagagtgacgagtcatatacatttggcaagaaaccatgaagctgcctacagccgtctcggtggcataagaacacaagaaattgtgttaattaatcaaagctataaataacgctcgcatgcctgtgcacttctcc

SEQ ID NO: 30345 - DNA, 612 bp, Cauliflower mosaic virus
ggtccgattgagacttttcaacaaagggtaatatccggaaacctcctcggattccattgcccagctatctgtcactttattgtgaagatagtggaaaaggaaggtggctcctacaaatgccatcattgcgataaaggaaaggccatcgttgaagatgcctctgccgacagtggtcccaaagatggacccccacccacgaggagcatcgtggaaaaagaagacgttccaaccacgtcttcaaagcaagtggattgatgtgatggtccgattgagacttttcaacaaagggtaatatccggaaacctcctcggattccattgcccagctatctgtcactttattgtgaagatagtggaaaaggaaggtggctcctacaaatgccatcattgcgataaaggaaaggccatcgttgaagatgcctctgccgacagtggtcccaaagatggacccccacccacgaggagcatcgtggaaaaagaagacgttccaaccacgtcttcaaagcaagtggattgatgtgatatctccactgacgtaagggatgacgcacaatcccactatccttcgcaagacccttcctctatataaggaagttcatttcatttggagagg

SEQ ID NO: 30346 - DNA, 523 bp, Zea mays
atcggaatattagcatgtcaacttgcactctctaaggctcctttggaaagcaggattttagaaaaaaaaatcatataaattttttacatgaatcagtttattttcggattatgaaatattttctcataacagtataacacatattttgtatataagttattatgttattatatataaccgttgcaacgtacgggcattcacctagtaaagaaagaagattaattattctctggtggagattgtgcccgagcccgaaggtcatgatatggacgttgcaaacccacttcacgaggggacaaaaaagaaatagggttaccactttcatcagttaaagggcgtgacatggacgtgttgaagatccggcacattccctgcgaaatatacacgtcatggtactaacgaggcatgaaactggccacatggccatggacgcgtgaagcgtgccatgcattggacatgcggcatccgaacttctgaagatcatatcagagagacactgatgtacgaactgccgtaacattct

SEQ ID NO: 30347 - DNA, 1942 bp, Zea mays
atgtgctggtgccccataaggtaggcacctaggtctgtgtttgaagcatcgacagatttgtaaacatgttcctatgaacctatttctgattgataatttgtcaaaactcatcatttgtcttcatccttgcctgcttgcgttcacgtgacaaagtacgtgtatgtcttcggcctttgctgtgtatgtttcgcattgcttagatgtggtgaaagaacatcagaagatgcattgatggcgtgcttaaaccagtgatgtgctccaggtgttcctgcagtctgcagagatatttactcttgtagtcttgttgacagcacagttgtatgtgatttcttggatgtaatgtaaaccaaatgaaagataggaacagttcgtcctcttccgtatacgaaggtcactgtatcatttgtcgtggcacaagatgatctgcaggcaggactgcaacatggtttcttggactgtcctgaatgcccgttcttgttctttagttgagccagagcagcagcctggtgtcggtgcctgagacctgacgaagcacacggcaaacaaacaagtcgcagcagctagcaggggcgttgccatcgccacaagcccccaagagacccgccgaggaaaagaaaaaaaaactacggccgccgttgccaagccgagcgtgcgaaccgatccacggatgggagatcagagatcacccaccgcaggcgggcggcagtggctggcgaggtgcgtccacagaacctgctgcaggtccctgtccgtcccggcgaccccttttctaggcgagcaactccccatggcagagctgcacgcagcagggcccgtcgttggttgcagctttaaccctttttgttttaaccatacaatgcagagtcgcagaggtgaaacaggacggaaattacagaaaagatggtggtgtgccagcagccccagcatgaagaagatcaggacaaaagaaaagcttgtgattggtgacagcaacaggattggattggagccaagctaggcagtgagaggcaggcagcaagacgcgtcagccactgaaatccagagggcaacctcggcctcacaactcatatccccttgtgctgttgcgcgccgtggttagccaggtgtgctgcagggggtaccatggcatgcatcgatagatctcgagggatccaaagacatggaggtggaaggcctgacgtagatagagaagatgctcttagctttcattgtctttcttttgtagtcatctgatttacctctctcgtttatacaactggttttttaaacactccttaacttttcaaattgtctctttctttaccctagactagataattttaatggtgattttgctaatgtggcgccatgttagatagaggtaaaatgaactagttaaaagctcagagtgataaatcaggctctcaaaaattcataaactgttttttaaatatccaaatatttttacatggaaaataataaaatttagtttagtattaaaaaattcagttgaatatagttttgtcttcaaaaattatgaaactgatcttaattatttttccttaaaaccgtgctctatctttgatgtctagtttgagacgattatataattttttttgtgcttaactacgacgagctgaagtacgtagaaatactagtggagtcgtgccgcgtgtgcctgtagccactcgtacgctacagcccaagcgctagagcccaagaggccggaggtggaaggcgtcgcggcactatagccactcgccgcaagagcccaagagaccggagctggaaggatgagggtctgggtgttcacgaattgcctggaggcaggaggctcgtcgtccggagccacaggcgtggagacgtccgggataaggtgagcagccgctgcgataggggcgcgtgtgaaccccgtcgcgccccacggatggtataagaataaaggcattccgcgtgcaggatt

SEQ ID NO: 30348 - DNA, 417 bp, Arabidopsis thaliana
attttacgtataaaataaaagatcatacctattagaacgattaaggagaaatacaattcgaatgagaaggatgtgccgtttgttataataaacagccacacgacgtaaacgtaaaatgaccacatgatgggccaatagacatggaccgactactaataatagtaagttacattttaggatggaataaatatcataccgacatcagtttgaaagaaaagggaaaaaaagaaaaaataaataaaagatatactaccgacatgagttccaaaaagcaaaaaaaaagatcaagccgacacagacacgcgtagagagcaaaatgactttgacgtcacaccacgaaaacagacgcttcatacgtgtccctttatctctctcagtctctctataaacttagtgagaccctcctctgttttactc

SEQ ID NO: 30349 - DNA, 1186 bp, artificial
  synthetic DNA
ctcgaggtcattcatatgcttgagaagagagtcgggatagtccaaaataaaacaaaggtaagattacctggtcaaaagtgaaaacatcagttaaaaggtggtataaagtaaaatatcggtaataaaaggtggcccaaagtgaaatttactcttttctactattataaaaattgaggatgtttttgtcggtactttgatacgtcatttttgtatgaattggtttttaagtttattcgcttttggaaatgcatatctgtatttgagtcgggttttaagttcgtttgcttttgtaaatacagagggatttgtataagaaatatctttagaaaaacccatatgctaatttgacataatttttgagaaaaatatatattcaggcgaattctcacaatgaacaataataagattaaaatagctttcccccgttgcagcgcatgggtattttttctagtaaaaataaaagataaacttagactcaaaacatttacaaaaacaacccctaaagttcctaaagcccaaagtgctatccacgatccatagcaagcccagcccaacccaacccaacccaacccaccccagtccagccaactggacaatagtctccacacccccccactatcaccgtgagttgtccgcacgcaccgcacgtctcgcagccaaaaaaaaaaagaaagaaaaaaaagaaaaagaaaaaacagcaggtgggtccgggtcgtgggggccggaaacgcgaggaggatcgcgagccagcgacgaggagcttaggcctcatcgttgaagatgcctctgccgacagtggtcccaaagatggacccccacccacgaggagcatcgtggaaaaagaagacgttccaaccacgtcttcaaagcaagtggattgatgtgatatctccactgacgtaagggatgacgcacaatcccactatccttcgaggcctcatcgttgaagatgcctctgccgacagtggtcccaaagatggacccccacccacgaggagcatcgtggaaaaagaagacgttccaaccacgtcttcaaagcaagtggattgatgtgatatctccactgacgtaagggatgacgcacaatcccactatccttcgaagctccctccctccgcttccaaagaaacgccccccatcgccactatatacatacccccccctctcctcccatccccccaaccct

SEQ ID NO: 30350 - DNA, 1528 bp, Zea mays
cacggctcacaataccagtcatctacatgtgataaattttatagttagattacttcttgtaatcatttcagaggatgaaaaaaaaatcgcaagaaagcaaatattttaaatgaatgatgcaatatacaaatttaattacacaattatgtaagattacattgtttagtttcatagaaatcaatttctagagtcataataatgcctaaattaaaattctattctatttttccttaagaaaaaaaacagcccattaaggaccattagaatgcgcgctgctccatttttttatatatagagatatgagttgttgctcactaggccactccacctcgcatgcgtgttctttattacatgaaaaaatgagccgctgcttttgcattaagggtctagagatgtacgagtgcaacgcttcgtattcactgcacgagtaatttttttttaatgcacggaggcgctttgtattcctcagcagctctgcgcgcccgtgcttcgtgtacggcagtgacgaggcagcagcagctctacgtgcccacgtgcctggctgcctgcccaccgtgatggcaaggcttgcttgcttgcgtgcctgcgtgtggcagcgacgaggttgaagctacggcggtggctgcttgcctgcgcgcgtgctagcacggcgacgacgtcgacgctgatgctagcgttgctacttttgtttttgttttctctgtgcttgcgatgatgcagtaaaataaacgtgtgtatctcatgtgattgatcgacgtgtgtcggcgatttcaaatcagtaacaatcacatgtgcatccccatcgacttcgtgtcggcgataaatctgctagggatttgtgcttttcatgtatgtgcttgaatagagaggaaagaataatattacataaaatatgagttcaacatctttcttaataccttttgctcgatctccttagtagagccacgtgcgtgataacgtgttaagaaccccttgctaccgagtgtagtccaagggctgcttaactgaataatagtagaacacaaggagacaagagtgtagagaggaactgattctttgttactatatggtgctgctctccaaaggttacatgatatggggatctcctctctatttatagacaaaactagggtttcaggcatatgggccacataggccttcctggcccaagaaaggtttcttaacactaccatcttccaggcgcggtcgtgcgtgcttcaactccttccctccgcctccagagcggataaatacggggtctacggtgcacgcgcacgcatggtgcgccgaggggcatctctgcccggggaatgcgcgcaggccatcgctcgacacgcacgtacgtgtcgcccccgcgaggcctcctcgcacacgcgtcgcgccgcacgggcgccgagggaccttgcaattcgtccgcgtcggtgcacacgtccctggtccggcttgccggctttgccctggcctcgcgcgcgacgtgccgcgtctccccaccggacggctataaaaaggcggcgccacctgatcctcc

SEQ ID NO: 30351 - DNA, 696 bp, Zea mays
aaaccgaggattggattttacgcgcatagagagattactaattgattattctaagagataaagaagtagttagcctgtacaacctctcttgcatgcatcacatgatgaactccatattatatatcatggttttaatacatttttaccatcttacgtaatcttgtgccgcgcaaatggtttgctatggcttcactcttctcttctgcgtgtgaagcgcaaccgcttaaaagcatataaaccatcttctcgggcatatagatttcttaatgacaatctcgcattgtttattgcctcacatggtgacacacagctcttacatttgtccttatactcacggtgcagtgcactactactgtaaccccatggtctggaaaacagcaacgcaacctttctgccttggaacagcaagctatacagcgctatataacaaacttgcacaataatatgctacatttctgaaagcaaactccgcttatcttcgcgttaaggaatggtattacacttaaaatgacaaaatatcacactttagaaccccacgcctttacctaaaaaaaagttgattgatacaagaacaaatgtttacagcttgttacacctcccatcaagcaaagaaatggaatcttttattttatgtacacgtgtacgggtagctattgtttataaattgcagaagacacctcaacatgatggataatt

SEQ ID NO: 30352 - DNA, 182 bp, Arabidopsis thaliana
agatctcattgtctgaacacagttagataaaactgggaataaatctggacgaaattacgatcttacaccaaccccctcgacgagctcgtatatataaagcttatacgctcctccttcaccttcgtactactactaccaccacatttctttagctcaaccttcattactaatctccttttaag

SEQ ID NO: 30353 - DNA, 14 bp, Arabidopsis thaliana
gagagaaagagaag

SEQ ID NO: 30354 - DNA, 80 bp, Oryza sativa
accaccaccaccaccaccacctccacctcctcccccctcgctgccggacgacgagctcctcccccctccccctccgccgc

SEQ ID NO: 30355 - DNA, 83 bp, Zea mays
cgtcgcctccgctgtccgctgcacagactgtagtaccggggcaggggcaggggcaggggcacaaacagagccacaccacacac

SEQ ID NO: 30356 - DNA, 23 bp, Oryza sativa
acaaaaagcattcagttcattag

SEQ ID NO: 30357 - DNA, 46 bp, Zea mays
ggccccaacattagcacaaagaacacaatagaccactgatttaaca

SEQ ID NO: 30358 - DNA, 40 bp, Rice tungro bacilliform virus
catcgatcaagcaagcgagacgtcaaacttctaagagagc

SEQ ID NO: 30359 - DNA, 65 bp, Hordeum vulgare
catccatcgagagacgttcgcagcagcaaagagcacgcagcaactagctttcagttgtttcaacc

SEQ ID NO: 30360 - DNA, 93 bp, Zea mays
aaggaaggagaagaagacgagtgtcaagtgaacctgaaacttgcggtgtcactggctggtagcctgagtgtgagtgagtgatcgagctagctg

SEQ ID NO: 30361 - DNA, 239 bp, Zea mays
cttttggtggcggggtccctgtccctggccggctttgcccacaggccacagcgcatcacaccaccgctttatagcgccaccccaccaccctcgtctctccccccgtcgagcacacaacacaccctcctcgtcctccaatccaatcaacctggtagactcgcttcgcttctccccccagctcggacggagctcctcgcagcagccgccgatcaacctgcgctcgggctcagcgctggaag

SEQ ID NO: 30362 - DNA, 93 bp, Zea mays
accaccggcgagccacatcgagaacacgatcgagcacacaagcacgaagactcgtttaggagaaaccacaaaccaccaagccgtgcaagcacc

SEQ ID NO: 30363 - DNA, 61 bp, Zea mays
atcaccaccactgggtcttcagaccattagctttatctactccagagcgcagaagaacccg

SEQ ID NO: 30364 - DNA, 9 bp, Cauliflower mosaic virus
acacgctga

SEQ ID NO: 30365 - DNA, 151 bp, Zea mays
attctatatataccctcagtccctgttccagttctcgttaagctagcagcaccaagttgtcgaacacttgcctgctcttgagctcgatcaagctatcatcagctgcgtcttgcgcacagcaacagcttcccaactgcaaccgtagcagcca

SEQ ID NO: 30366 - DNA, 165 bp, Zea mays
cacccgttcgcctctcaccttttcgctgtactcactcgccacacacaccccctctccagctccgttggagctccggacagcagcaggcgcggggcggtcacgtagtaagcagctctcggctccctctccccttgctccatttgatagtgcaacccatcgagctac

SEQ ID NO: 30367 - DNA, 80 bp, Arabidopsis thaliana
acaaataagcaaactagaaaacaatcatcaggaataaagggtttgattacttctattggaaagaaaaaaatctttggaaa

SEQ ID NO: 30368 - DNA, 61 bp, Triticum aestivum
aaccatcttccacacactcaagccacactattggagaacacacagggacaacacaccataa

SEQ ID NO: 30369 - DNA, 119 bp, Zea mays
atctcacacaagcaaagcagcagcaacagccaacacctaaactaaagaacagtagtagtccctgtgtacgtctagcaacgatccgcgccgagctcgccagttttgctcgttagtttggg

SEQ ID NO: 30370 - DNA, 80 bp, Zea mays
gtatacgcaaaactactttcctcgaattccccattctataaattccagttaaacttaattcgtaagatcaatcataattc

SEQ ID NO: 30371 - DNA, 208 bp, Arabidopsis thaliana
gtaagttcacttttcttcgattcatactttctcaagattcctgcatttctttagaatttgaaccaagtgtcgatttttgtttgagagaagtgttgatttatagatctggttattgaatctagattccaatttttaattgattcgagtttgttaagtgcgtttatactacttctcattgatcttgtttgatttctctgctctgtattag

SEQ ID NO: 30372 - DNA, 478 bp, Oryza sativa
cgccgcgccggtaaccaccccgcccctctcctctttctttctccgtttttttttccgtctcggtctcgatctttggccttggtagtttgggtgggcgagaggcggcttcgtgcgcgcccagatcggtgcgcgggaggggcgggatctcgcggctggggctctcgccggcgtggatccggcccggatctcgcggggaatggggctctcggatgtagatctgcgatccgccgttgttgggggagatgatggggggtttaaaatttccgccgtgctaaacaagatcaggaagaggggaaaagggcactatggtttatatttttatatatttctgctgcttcgtcaggcttagatgtgctagatctttctttcttctttttgtgggtagaatttgaatccctcagcattgttcatcggtagtttttcttttcatgatttgtgacaaatgcagcctcgtgcggagcttttttgtaggtagaag

SEQ ID NO: 30373 - DNA, 804 bp, Zea mays
accgtcttcggtacgcgctcactccgccctctgcctttgttactgccacgtttctctgaatgctctcttgtgtggtgattgctgagagtggtttagctggatctagaattacactctgaaatcgtgttctgcctgtgctgattacttgccgtcctttgtagcagcaaaatatagggacatggtagtacgaaacgaagatagaacctacacagcaatacgagaaatgtgtaatttggtgcttagcggtatttatttaagcacatgttggtgttatagggcacttggattcagaagtttgctgttaatttaggcacaggcttcatactacatgggtcaatagtatagggattcatattataggcgatactataataatttgttcgtctgcagagcttattatttgccaaaattagatattcctattctgtttttgtttgtgtgctgttaaattgttaacgcctgaaggaataaatataaatgacgaaattttgatgtttatctctgctcctttattgtgaccataagtcaagatcagatgcacttgttttaaatattgttgtctgaagaaataagtactgacagtattttgatgcattgatctgcttgtttgttgtaacaaaatttaaaaataaagagtttcctttttgttgctctccttacctcctgatggtatctagtatctaccaactgacactatattgcttctctttacatacgtatcttgctcgatgccttctccctagtgttgaccagtgttactcacatagtctttgctcatttcattgtaatgcagataccaagcgg

SEQ ID NO: 30374 - DNA, 985 bp, Zea mays
gtgagagctcagtgcctcgtcccgcccgccccaaatctggttcttgtgctggctctggctgtgcgctgcacgaattctgcatctggttctttcgagacgcaattcccggaccgtgggctttggtttcggagggggccgagagtaaggcgttaggactttctccgagctgcaaggccgctcgtcgttgcggcatttttcgtttcgcttgtcctgtgatgagagatgtgcatttccctttggcgggcttaccgttccctgctcgtctgtatgtgtgtatgtttgtgtgacctttccctcaacgccaggctcttctcccctcttgctgtttctttcagcagtacagacgcgcatctgtacagcgcctttcttcggtcctgggttatgattgatccgttaacagttggtcaccaagtgctggctgtttaatatgtactataagcttcttggtgccgctgcctctgcctatacgactttatgcgctgcctgcacaagtctcagccatctgtgggaacgtgtgtctctcacctacctttcatattgcactagctggattgaatcattctgctttggagagatgtccggtcatttttttttaaatcattttcatctcgcgtactagtttttgttttgttttgcgagagagtaatttttttttaatatttactgtctcctgtcccatttgctgtttctttacccagaaatttccaccagattcagtcaaacgaaactcctgtgctcttttttttctccctttcaaaagggtgtgtaaccgactaccgactcagataatataagtgcggtcacatatcacatgatatcatctcgcctctctcccttctcctgtgttttattttccttttttctaaccacagcgtgatgaacttcttttttttttgggggggggggggggggtaactacagcttagcgaacatgaatgggtagttttacaactaatgcaacggctggttcactgaacaactgtag

SEQ ID NO: 30375 - DNA, 480 bp, Oryza sativa
ccgccgccgccggtaaccaccccgcccctctcctctttctttctccgtttttttttccgtctcggtctcgatctttggccttggtagtttgggtgggcgagaggcggcttcgtgcgcgcccagatcggtgcgcgggaggggcgggatctcgcggctggggctctcgccggcgtggatccggcccggatctcgcggggaatggggctctcggatgtagatctgcgatccgccgttgttgggggagatgatggggggtttaaaatttccgccgtgctaaacaagatcaggaagaggggaaaagggcactatggtttatatttttatatatttctgctgcttcgtcaggcttagatgtgctagatctttctttcttctttttgtgggtagaatttgaatccctcagcattgttcatcggtagtttttcttttcatgatttgtgacaaatgcagcctcgtgcggagcttttttgtaggtagaag

SEQ ID NO: 30376 - DNA, 8504 bp, artificial
  synthetic DNA
gtaccctcagcagtcgctgtgcgatcgccagcggtactcgctgaggtcgacgtagttagttaattcagctttcgttcgtatcatcggtttcgacaacgttcgtcaagttcaatgcatcagtttcattgcgcacacaccagaatcctactgagtttgagtattatggcattgggaaaactgtttttcttgtaccatttgttgtgcttgtaatttactgtgttttttattcggttttcgctatcgaactgtgaaatggaaatggatggagaagagttaatgaatgatatggtccttttgttcattctcaaattaatattatttgttttttctcttatttgttgtgtgttgaatttgaaattataagagatatgcaaacattttgttttgagtaaaaatgtgtcaaatcgtggcctctaatgaccgaagttaatatgaggagtaaaacacttgtagttgtaccattatgcttattcactaggcaacaaatatattttcagacctagaaaagctgcaaatgttactgaatacaagtatgtcctcttgtgttttagacatttatgaactttcctttatgtaattttccagaatccttgtcagattctaatcattgctttataattatagttatactcatggatttgtagttgagtatgaaaatattttttaatgcattttatgacttgccaattgattgacaacgcggccgccactcgagtggaagctagctttccgatcctacctgtcacttcatcaaaaggacagtagaaaaggaaggtggcacctacaaatgccatcattgcgataaaggaaaggctatcattcaagatgcctctgccgacagtggtcccaaagatggacccccacccacgaggagcatcgtggaaaaagaagacgttccaaccacgtcttcaaagcaagtggattgatgtgatacttccactgacgtaagggatgacgcacaatcccactatccttcgcaagacccttcctctatataaggaagttcatttcatttggagaggacacgctgaaatcaccagtctctctctacaagatcggggatctctagctagacgatcgtttcgcatgattgaacaagatggattgcacgcaggttctccggccgcttgggtggagaggctattcggctatgactgggcacaacagacaatcggctgctctgatgccgccgtgttccggctgtcagcgcaggggcgcccggttctttttgtcaagaccgacctgtccggtgccctgaatgaactgcaggacgaggcagcgcggctatcgtggctggccacgacgggcgttccttgcgcagctgtgctcgacgttgtcactgaagcgggaagggactggctgctattgggcgaagtgccggggcaggatctcctgtcatctcaccttgctcctgccgagaaagtatccatcatggctgatgcaatgcggcggctgcatacgcttgatccggctacctgcccattcgaccaccaagcgaaacatcgcatcgagcgagcacgtactcggatggaagccggtcttgtcgatcaggatgatctggacgaagagcatcaggggctcgcgccagccgaactgttcgccaggctcaaggcgcgcatgcccgacggcgaggatctcgtcgtgacccatggcgatgcctgcttgccgaatatcatggtggaaaatggccgcttttctggattcatcgactgtggccggctgggtgtggcggaccgctatcaggacatagcgttggctacccgtgatattgctgaagagcttggcggcgaatgggctgaccgcttcctcgtgctttacggtatcgccgctcccgattcgcagcgcatcgccttctatcgccttcttgacgagttcttctgagcgggactctggggttcgatccccaattcccgatcgttcaaacatttggcaataaagtttcttaagattgaatcctgttgccggtcttgcgatgattatcatataatttctgttgaattacgttaagcatgtaataattaacatgtaatgcatgacgttatttatgagatgggtttttatgattagagtcccgcaattatacatttaatacgcgatagaaaacaaaatatagcgcgcaaactaggataaattatcgcgcgcggtgtcatctatgttactagatcggggatcgggccactcgagtggtggccgcatcgatcgtgaagtttctcatctaagcccccatttggacgtgaatgtagacacgtcgaaataaagatttccgaattagaataatttgtttattgctttcgcctataaatacgacggatcgtaatttgtcgttttatcaaaatgtactttcattttataataacgctgcggacatctacatttttgaattgaaaaaaaattggtaattactctttctttttctccatattgaccatcatactcattgctgatccatgtagatttcccggacatgaagccatttacaattgaatatatcctgccgccgctgccgctttgcacccggtggagcttgcatgttggtttctacgcagaactgagccggttaggcagataatttccattgagaactgagccatgtgcaccttccccccaacacggtgagcgacggggcaacggagtgatccacatgggacttttcctagcttggctgccatttttggggtgaggccgttcgcggccgaggggcgcagcccctggggggatgggaggcccgcgttagcgggccgggagggttcgagaagggggggcaccccccttcggcgtgcgcggtcacgcgcacagggcgcagccctggttaaaaacaaggtttataaatattggtttaaaagcaggttaaaagacaggttagcggtggccgaaaaacgggcggaaacccttgcaaatgctggattttctgcctgtggacagcccctcaaatgtcaataggtgcgcccctcatctgtcagcactctgcccctcaagtgtcaaggatcgcgcccctcatctgtcagtagtcgcgcccctcaagtgtcaataccgcagggcacttatccccaggcttgtccacatcatctgtgggaaactcgcgtaaaatcaggcgttttcgccgatttgcgaggctggccagctccacgtcgccggccgaaatcgagcctgcccctcatctgtcaacgccgcgccgggtgagtcggcccctcaagtgtcaacgtccgcccctcatctgtcagtgagggccaagttttccgcgaggtatccacaacgccggcggccggccgcggtgtctcgcacacggcttcgacggcgtttctggcgcgtttgcagggccatagacggccgccagcccagcggcgagggcaaccagcccggtgagcgtcggaaagggtcgatcgaccgatgcccttgagagccttcaacccagtcagctccttccggtgggcgcggggcatgactatcgtcgccgcacttatgactgtcttctttatcatgcaactcgtaggacaggtgccggcagcgctctgggtcattttcggcgaggaccgctttcgctggagcgcgacgatgatcggcctgtcgcttgcggtattcggaatcttgcacgccctcgctcaagccttcgtcactggtcccgccaccaaacgtttcggcgagaagcaggccattatcgccggcatggcggccgacgcgctgggctacgtcttgctggcgttcgcgacgcgaggctggatggccttccccattatgattcttctcgcttccggcggcatcgggatgcccgcgttgcaggccatgctgtccaggcaggtagatgacgaccatcagggacagcttcaaggatcgctcgcggctcttaccagcctaacttcgatcattggaccgctgatcgtcacggcgatttatgccgcctcggcgagcacatggaacgggttggcatggattgtaggcgccgccctataccttgtctgcctccccgcgttgcgtcgcggtgcatggagccgggccacctcgacctgaatggaagccggcggcacctcgctaacggattcaccactccaagaattggagccaatcaattcttgcggagaactgtgaatgcgcaaaccaacccttggcagaacatatccatcgcgtccgccatctccagcagccgcacgcggcgcatctcgggcagcgttgggtcctggccacgggtgcgcatgatcgtgctcctgtcgttgaggacccggctaggctggcggggttgccttactggttagcagaatgaatcaccgatacgcgagcgaacgtgaagcgactgctgctgcaaaacgtctgcgacctgagcaacaacatgaatggtcttcggtttccgtgtttcgtaaagtctggaaacgcggaagtcagcgccctgcaccattatgttccggatctgcatcgcaggatgctgctggctaccctgtggaacacctacatctgtattaacgaagcgctggcattgaccctgagtgatttttctctggtcccgccgcatccataccgccagttgtttaccctcacaacgttccagtaaccgggcatgttcatcatcagtaacccgtatcgtgagcatcctctctcgtttcatcggtatcattacccccatgaacagaaatcccccttacacggaggcatcagtgaccaaacaggaaaaaaccgcccttaacatggcccgctttatcagaagccagacattaacgcttctggagaaactcaacgagctggacgcggatgaacaggcagacatctgtgaatcgcttcacgaccacgctgatgagctttaccgcagctgcctcgcgcgtttcggtgatgacggtgaaaacctctgacacatgcagctcccggagacggtcacagcttgtctgtaagcggatgccgggagcagacaagcccgtcagggcgcgtcagcgggtgttggcgggtgtcggggcgcagccatgacccagtcacgtagcgatagcggagtgtatactggcttaactatgcggcatcagagcagattgtactgagagtgcaccatatgcggtgtgaaataccgcacagatgcgtaaggagaaaataccgcatcaggcgctcttccgcttcctcgctcactgactcgctgcgctcggtcgttcggctgcggcgagcggtatcagctcactcaaaggcggtaatacggttatccacagaatcaggggataacgcaggaaagaacatgtgagcaaaaggccagcaaaaggccaggaaccgtaaaaaggccgcgttgctggcgtttttccataggctccgcccccctgacgagcatcacaaaaatcgacgctcaagtcagaggtggcgaaacccgacaggactataaagataccaggcgtttccccctggaagctccctcgtgcgctctcctgttccgaccctgccgcttaccggatacctgtccgcctttctcccttcgggaagcgtggcgctttctcatagctcacgctgtaggtatctcagttcggtgtaggtcgttcgctccaagctgggctgtgtgcacgaaccccccgttcagcccgaccgctgcgccttatccggtaactatcgtcttgagtccaacccggtaagacacgacttatcgccactggcagcagccactggtaacaggattagcagagcgaggtatgtaggcggtgctacagagttcttgaagtggtggcctaactacggctacactagaaggacagtatttggtatctgcgctctgctgaagccagttaccttcggaaaaagagttggtagctcttgatccggcaaacaaaccaccgctggtagcggtggtttttttgtttgcaagcagcagattacgcgcagaaaaaaaggatctcaagaagatcctttgatcttttctacggggtctgacgctcagtggaacgaaaactcacgttaagggattttggtcatgagattatcaaaaaggatcttcacctagatccttttaaattaaaaatgaagttttaaatcaatctaaagtatatatgagtaaacttggtctgacagttaccaatgcttaatcagtgaggcacctatctcagcgatctgtctatttcgttcatccatagttgcctgactccccgtcgtgtagataactacgatacgggagggcttaccatctggccccagtgctgcaatgataccgcgagacccacgctcaccggctccagatttatcagcaataaaccagccagccggaagggccgagcgcagaagtggtcctgcaactttatccgcctccatccagtctattaattgttgccgggaagctagagtaagtagttcgccagttaatagtttgcgcaacgttgttgccattgctgcaggtcgggagcacaggatgacgcctaacaattcattcaagccgacaccgcttcgcggcgcggcttaattcaggagttaaacatcatgagggaagcggtgatcgccgaagtatcgactcaactatcagaggtagttggcgtcatcgagcgccatctcgaaccgacgttgctggccgtacatttgtacggctccgcagtggatggcggcctgaagccacacagtgatattgatttgctggttacggtgaccgtaaggcttgatgaaacaacgcggcgagctttgatcaacgaccttttggaaacttcggcttcccctggagagagcgagattctccgcgctgtagaagtcaccattgttgtgcacgacgacatcattccgtggcgttatccagctaagcgcgaactgcaatttggagaatggcagcgcaatgacattcttgcaggtatcttcgagccagccacgatcgacattgatctggctatcttgctgacaaaagcaagagaacatagcgttgccttggtaggtccagcggcggaggaactctttgatccggttcctgaacaggatctatttgaggcgctaaatgaaaccttaacgctatggaactcgccgcccgactgggctggcgatgagcgaaatgtagtgcttacgttgtcccgcatttggtacagcgcagtaaccggcaaaatcgcgccgaaggatgtcgctgccgactgggcaatggagcgcctgccggcccagtatcagcccgtcatacttgaagctaggcaggcttatcttggacaagaagatcgcttggcctcgcgcgcagatcagttggaagaatttgttcactacgtgaaaggcgagatcaccaaggtagtcggcaaataatgtctaacaattcgttcaagccgacgccgcttcgcggcgcggcttaactcaagcgttagatgctgcaggcatcgtggtgtcacgctcgtcgtttggtatggcttcattcagctccggttcccaacgatcaaggcgagttacatgatcccccatgttgtgcaaaaaagcggttagctccttcggtcctccgatcgaggatttttcggcgctgcgctacgtccgcgaccgcgttgagggatcaagccacagcagcccactcgaccttctagccgacccagacgagccaagggatctttttggaatgctgctccgtcgtcaggctttccgacgtttgggtggttgaacagaagtcattatcgcacggaatgccaagcactcccgaggggaaccctgtggttggcatgcacatacaaatggacgaacggataaaccttttcacgcccttttaaatatccgattattctaataaacgctcttttctcttaggtttacccgccaatatatcctgtcaaacactgatagtttaaactgaaggcgggaaacgacaatctgatccccatcaagcttggccagcttctgcaggtccgattgagacttttcaacaaagggtaatatccggaaacctcctcggattccattgcccagctatctgtcactttattgtgaagatagtggaaaaggaaggtggctcctacaaatgccatcattgcgataaaggaaaggccatcgttgaagatgcctctgccgacagtggtcccaaagatggacccccacccacgaggagcatcgtggaaaaagaagacgttccaaccacgtcttcaaagcaagtggattgatgtgatggtccgattgagacttttcaacaaagggtaatatccggaaacctcctcggattccattgcccagctatctgtcactttattgtgaagatagtggaaaaggaaggtggctcctacaaatgccatcattgcgataaaggaaaggccatcgttgaagatgcctctgccgacagtggtcccaaagatggacccccacccacgaggagcatcgtggaaaaagaagacgttccaaccacgtcttcaaagcaagtggattgatgtgatatctccactgacgtaagggatgacgcacaatcccactatccttcgcaagacccttcctctatataaggaagttcatttcatttggagaggacacagaaaaatttgctacattgtttcacaaacttcaaatattattcatttatttgtcagctttcaaactctttgtttcttgtttgttgattagatctg

SEQ ID NO: 30377 - protein, 599 aa, artificial
  consensus
  misc_feature (1)..(214): Xaa can be any naturally occurring amino acid
  misc_feature (216)..(224): Xaa can be any naturally occurring amino acid
  misc_feature (226)..(231): Xaa can be any naturally occurring amino acid
  misc_feature (233)..(233): Xaa can be any naturally occurring amino acid
  misc_feature (236)..(299): Xaa can be any naturally occurring amino acid
  misc_feature (301)..(307): Xaa can be any naturally occurring amino acid
  misc_feature (309)..(319): Xaa can be any naturally occurring amino acid
  misc_feature (323)..(337): Xaa can be any naturally occurring amino acid
  misc_feature (340)..(377): Xaa can be any naturally occurring amino acid
  misc_feature (379)..(403): Xaa can be any naturally occurring amino acid
  misc_feature (405)..(406): Xaa can be any naturally occurring amino acid
  misc_feature (408)..(414): Xaa can be any naturally occurring amino acid
  misc_feature (416)..(421): Xaa can be any naturally occurring amino acid
  misc_feature (423)..(424): Xaa can be any naturally occurring amino acid
  misc_feature (426)..(437): Xaa can be any naturally occurring amino acid
  misc_feature (439)..(439): Xaa can be any naturally occurring amino acid
  misc_feature (449)..(449): Xaa can be any naturally occurring amino acid
  misc_feature (453)..(453): Xaa can be any naturally occurring amino acid
  misc_feature (455)..(455): Xaa can be any naturally occurring amino acid
  misc_feature (458)..(458): Xaa can be any naturally occurring amino acid
  misc_feature (461)..(461): Xaa can be any naturally occurring amino acid
  misc_feature (473)..(473): Xaa can be any naturally occurring amino acid
  misc_feature (476)..(476): Xaa can be any naturally occurring amino acid
  misc_feature (481)..(481): Xaa can be any naturally occurring amino acid
  misc_feature (487)..(487): Xaa can be any naturally occurring amino acid
  misc_feature (490)..(491): Xaa can be any naturally occurring amino acid
  misc_feature (493)..(496): Xaa can be any naturally occurring amino acid
  misc_feature (498)..(525): Xaa can be any naturally occurring amino acid
  misc_feature (529)..(529): Xaa can be any naturally occurring amino acid
  misc_feature (539)..(539): Xaa can be any naturally occurring amino acid
  misc_feature (543)..(545): Xaa can be any naturally occurring amino acid
  misc_feature (547)..(599): Xaa can be any naturally occurring amino acid
XXXXXXXXXXXXXXXXXXXXXXXXXXXXXXXXXXXXXXXXXXXXXXXXXXXXXXXXXXXXXXXXXXXXXXXXXXXXXXXXXXXXXXXXXXXXXXXXXXXXXXXXXXXXXXXXXXXXXXXXXXXXXXXXXXXXXXXXXXXXXXXXXXXXXXXXXXXXXXXXXXXXXXXXXXXXXXXXXXXXXXXXXXXXXXXXXXXXXXXXXXXXXXXXXXXXXXYXXXXXXXXXSXXXXXXDXSLXXXXXXXXXXXXXXXXXXXXXXXXXXXXXXXXXXXXXXXXXXXXXXXXXXXXXXXXXXXXXXXXSXXXXXXXEXXXXXXXXXXXLSSXXXXXXXXXXXXXXXSPXXXXXXXXXXXXXXXXXXXXXXXXXXXXXXXXXXXXXXQXXXXXXXXXXXXXXXXXXXXXXXXXTXXAXXXXXXXEXXXXXXGXXKXXXXXXXXXXXXSXVVDGSFVSSXSSDXSXEEXSFXQLQDAVSQLDVXTKXCIRDXLYRLAXSAXXRXXXXNXXXXXXXXXXXXXXXXXXXXXXXXXXXXIETXTNPIDRSIAXLLFXXXSXXXXXXXXXXXXXXXXXXXXXXXXXXXXXXXXXXXXXXXXXXXXXXXXXXXXX

SEQ ID NO: 30378 - protein, 599 aa, artificial; identical to SEQ ID NO: 30377
  consensus
  misc_feature (1)..(214): Xaa can be any naturally occurring amino acid
  misc_feature (216)..(224): Xaa can be any naturally occurring amino acid
  misc_feature (226)..(231): Xaa can be any naturally occurring amino acid
  misc_feature (233)..(233): Xaa can be any naturally occurring amino acid
  misc_feature (236)..(299): Xaa can be any naturally occurring amino acid
  misc_feature (301)..(307): Xaa can be any naturally occurring amino acid
  misc_feature (309)..(319): Xaa can be any naturally occurring amino acid
  misc_feature (323)..(337): Xaa can be any naturally occurring amino acid
  misc_feature (340)..(377): Xaa can be any naturally occurring amino acid
  misc_feature (379)..(403): Xaa can be any naturally occurring amino acid
  misc_feature (405)..(406): Xaa can be any naturally occurring amino acid
  misc_feature (408)..(414): Xaa can be any naturally occurring amino acid
  misc_feature (416)..(421): Xaa can be any naturally occurring amino acid
  misc_feature (423)..(424): Xaa can be any naturally occurring amino acid
  misc_feature (426)..(437): Xaa can be any naturally occurring amino acid
  misc_feature (439)..(439): Xaa can be any naturally occurring amino acid
  misc_feature (449)..(449): Xaa can be any naturally occurring amino acid
  misc_feature (453)..(453): Xaa can be any naturally occurring amino acid
  misc_feature (455)..(455): Xaa can be any naturally occurring amino acid
  misc_feature (458)..(458): Xaa can be any naturally occurring amino acid
  misc_feature (461)..(461): Xaa can be any naturally occurring amino acid
  misc_feature (473)..(473): Xaa can be any naturally occurring amino acid
  misc_feature (476)..(476): Xaa can be any naturally occurring amino acid
  misc_feature (481)..(481): Xaa can be any naturally occurring amino acid
  misc_feature (487)..(487): Xaa can be any naturally occurring amino acid
  misc_feature (490)..(491): Xaa can be any naturally occurring amino acid
  misc_feature (493)..(496): Xaa can be any naturally occurring amino acid
  misc_feature (498)..(525): Xaa can be any naturally occurring amino acid
  misc_feature (529)..(529): Xaa can be any naturally occurring amino acid
  misc_feature (539)..(539): Xaa can be any naturally occurring amino acid
  misc_feature (543)..(545): Xaa can be any naturally occurring amino acid
  misc_feature (547)..(599): Xaa can be any naturally occurring amino acid

SEQ ID NO: 30379 - protein, 154 aa, artificial
  consensus
  misc_feature (1)..(78): Xaa can be any naturally occurring amino acid
  misc_feature (82)..(83): Xaa can be any naturally occurring amino acid
  misc_feature (85)..(87): Xaa can be any naturally occurring amino acid
  misc_feature (89)..(90): Xaa can be any naturally occurring amino acid
  misc_feature (93)..(93): Xaa can be any naturally occurring amino acid
  misc_feature (101)..(101): Xaa can be any naturally occurring amino acid
  misc_feature (109)..(109): Xaa can be any naturally occurring amino acid
  misc_feature (111)..(112): Xaa can be any naturally occurring amino acid
  misc_feature (115)..(116): Xaa can be any naturally occurring amino acid
  misc_feature (118)..(123): Xaa can be any naturally occurring amino acid
  misc_feature (126)..(127): Xaa can be any naturally occurring amino acid
  misc_feature (131)..(131): Xaa can be any naturally occurring amino acid
  misc_feature (133)..(154): Xaa can be any naturally occurring amino acid
XXXXXXXXXXXXXXXXXXXXXXXXXXXXXXXXXXXXXXXXXXXXXXXXXXXXXXXXXXXXXXXXXXXXXXXXXXXXXXYFSXXSXXXLXXLTXSLLILPLXLPPLPPPXPXXLLXXPXXXXXXLLXXLAFXPXXXXXXXXXXXXXXXXXXXXXX

SEQ ID NO: 30380 - protein, 124 aa, artificial
  consensus
  misc_feature (10)..(10): Xaa can be any naturally occurring amino acid
  misc_feature (18)..(19): Xaa can be any naturally occurring amino acid
  misc_feature (23)..(30): Xaa can be any naturally occurring amino acid
  misc_feature (35)..(35): Xaa can be any naturally occurring amino acid
  misc_feature (44)..(44): Xaa can be any naturally occurring amino acid
  misc_feature (48)..(49): Xaa can be any naturally occurring amino acid
  misc_feature (53)..(53): Xaa can be any naturally occurring amino acid
  misc_feature (61)..(61): Xaa can be any naturally occurring amino acid
  misc_feature (78)..(78): Xaa can be any naturally occurring amino acid
  misc_feature (87)..(88): Xaa can be any naturally occurring amino acid
  misc_feature (107)..(107): Xaa can be any naturally occurring amino acid
  misc_feature (115)..(115): Xaa can be any naturally occurring amino acid
MFRAMSTRKXHGGYEKLXXEEAXXXXXXXXLKRVXSVPASVYGXSRNXXPVQXEVKKTPTXKPTGGSVHPLFSFFDVXFQRKKKKTXXKKSLATAKPEFARYMEYVXEGGVWDPXSNAPVIHYR

SEQ ID NO: 30381 - protein, 667 aa, artificial
  consensus
  misc_feature (1)..(17): Xaa can be any naturally occurring amino acid
  misc_feature (19)..(24): Xaa can be any naturally occurring amino acid
  misc_feature (26)..(50): Xaa can be any naturally occurring amino acid
  misc_feature (52)..(55): Xaa can be any naturally occurring amino acid
  misc_feature (80)..(80): Xaa can be any naturally occurring amino acid
  misc_feature (82)..(82): Xaa can be any naturally occurring amino acid
  misc_feature (91)..(91): Xaa can be any naturally occurring amino acid
  misc_feature (96)..(96): Xaa can be any naturally occurring amino acid
  misc_feature (103)..(103): Xaa can be any naturally occurring amino acid
  misc_feature (106)..(107): Xaa can be any naturally occurring amino acid
  misc_feature (109)..(111): Xaa can be any naturally occurring amino acid
  misc_feature (117)..(130): Xaa can be any naturally occurring amino acid
  misc_feature (132)..(144): Xaa can be any naturally occurring amino acid
  misc_feature (150)..(152): Xaa can be any naturally occurring amino acid
  misc_feature (154)..(155): Xaa can be any naturally occurring amino acid
  misc_feature (159)..(161): Xaa can be any naturally occurring amino acid
  misc_feature (165)..(263): Xaa can be any naturally occurring amino acid
  misc_feature (265)..(289): Xaa can be any naturally occurring amino acid
  misc_feature (291)..(324): Xaa can be any naturally occurring amino acid
  misc_feature (326)..(562): Xaa can be any naturally occurring amino acid
  misc_feature (564)..(590): Xaa can be any naturally occurring amino acid
  misc_feature (592)..(667): Xaa can be any naturally occurring amino acid
XXXXXXXXXXXXXXXXXLXXXXXXSXXXXXXXXXXXXXXXXXXXXXXXXXRXXXXIRMGGGPRTFPGGVSKWQWKRMQAXKXKQLLKARLXRERQXYEMRKRXELXXAXXXLERPWXXXXXXXXXXXXXXPXXXXXXXXXXXXXLADRFXXXGXXDLWXXXDGPXXXXXXXXXXXXXXXXXXXXXXXXXXXXXXXXXXXXXXXXXXXXXXXXXXXXXXXXXXXXXXXXXXXXXXXXXXXXXXXXXXXXXXXXXXXXXXXXXXXDXXXXXXXXXXXXXXXXXXXXXXXXXGXXXXXXXXXXXXXXXXXXXXXXXXXXXXXXXXXXDXXXXXXXXXXXXXXXXXXXXXXXXXXXXXXXXXXXXXXXXXXXXXXXXXXXXXXXXXXXXXXXXXXXXXXXXXXXXXXXXXXXXXXXXXXXXXXXXXXXXXXXXXXXXXXXXXXXXXXXXXXXXXXXXXXXXXXXXXXXXXXXXXXXXXXXXXXXXXXXXXXXXXXXXXXXXXXXXXXXXXXXXXXXXXXXXXXXXXXXXXXXXXXXXXXXXXXXXXXXXXXXXXXXXXXXXXXXXXLXXXXXXXXXXXXXXXXXXXXXXXXXXXGXXXXXXXXXXXXXXXXXXXXXXXXXXXXXXXXXXXXXXXXXXXXXXXXXXXXXXXXXXXXXXXXXXXXXXXXXXXX

SEQ ID NO: 30382 - protein, 347 aa, artificial
  consensus
  misc_feature (3)..(40): Xaa can be any naturally occurring amino acid
  misc_feature (42)..(42): Xaa can be any naturally occurring amino acid
  misc_feature (44)..(44): Xaa can be any naturally occurring amino acid
  misc_feature (63)..(63): Xaa can be any naturally occurring amino acid
  misc_feature (77)..(102): Xaa can be any naturally occurring amino acid
  misc_feature (104)..(118): Xaa can be any naturally occurring amino acid
  misc_feature (120)..(122): Xaa can be any naturally occurring amino acid
  misc_feature (128)..(130): Xaa can be any naturally occurring amino acid
  misc_feature (133)..(133): Xaa can be any naturally occurring amino acid
  misc_feature (136)..(136): Xaa can be any naturally occurring amino acid
  misc_feature (138)..(347): Xaa can be any naturally occurring amino acid
MRXXXXXXXXXXXXXXXXXXXXXXXXXXXXXXXXXXXXXXSXWXSPVPYLFGGLAAMLGLIAXALLILACSYWKLSXXXXXXXXXXXXXXXXXXXXXXXXXXEXXXXXXXXXXXXXXXEXXXVIMAGXXXPTXLAXPXXXXXXXXXXXXXXXXXXXXXXXXXXXXXXXXXXXXXXXXXXXXXXXXXXXXXXXXXXXXXXXXXXXXXXXXXXXXXXXXXXXXXXXXXXXXXXXXXXXXXXXXXXXXXXXXXXXXXXXXXXXXXXXXXXXXXXXXXXXXXXXXXXXXXXXXXXXXXXXXXXXXXXXXXXXXXXXXXXXXXXXXXXXXXXXXXXXXXXXXXXXXXXXXXX

SEQ ID NO: 30383 - protein, 347 aa, artificial; identical to SEQ ID NO: 30382
  consensus
  misc_feature (3)..(40): Xaa can be any naturally occurring amino acid
  misc_feature (42)..(42): Xaa can be any naturally occurring amino acid
  misc_feature (44)..(44): Xaa can be any naturally occurring amino acid
  misc_feature (63)..(63): Xaa can be any naturally occurring amino acid
  misc_feature (77)..(102): Xaa can be any naturally occurring amino acid
  misc_feature (104)..(118): Xaa can be any naturally occurring amino acid
  misc_feature (120)..(122): Xaa can be any naturally occurring amino acid
  misc_feature (128)..(130): Xaa can be any naturally occurring amino acid
  misc_feature (133)..(133): Xaa can be any naturally occurring amino acid
  misc_feature (136)..(136): Xaa can be any naturally occurring amino acid
  misc_feature (138)..(347): Xaa can be any naturally occurring amino acid

SEQ ID NO: 30384 - protein, 885 aa, artificial
  consensus
  misc_feature (1)..(57): Xaa can be any naturally occurring amino acid
  misc_feature (61)..(62): Xaa can be any naturally occurring amino acid
  misc_feature (67)..(68): Xaa can be any naturally occurring amino acid
  misc_feature (72)..(72): Xaa can be any naturally occurring amino acid
  misc_feature (78)..(100): Xaa can be any naturally occurring amino acid
  misc_feature (104)..(104): Xaa can be any naturally occurring amino acid
  misc_feature (107)..(108): Xaa can be any naturally occurring amino acid
  misc_feature (110)..(110): Xaa can be any naturally occurring amino acid
  misc_feature (115)..(115): Xaa can be any naturally occurring amino acid
  misc_feature (118)..(119): Xaa can be any naturally occurring amino acid
  misc_feature (122)..(124): Xaa can be any naturally occurring amino acid
  misc_feature (126)..(127): Xaa can be any naturally occurring amino acid
  misc_feature (131)..(131): Xaa can be any naturally occurring amino acid
  misc_feature (135)..(147): Xaa can be any naturally occurring amino acid
  misc_feature (149)..(149): Xaa can be any naturally occurring amino acid
  misc_feature (151)..(151): Xaa can be any naturally occurring amino acid
  misc_feature (155)..(156): Xaa can be any naturally occurring amino acid
  misc_feature (158)..(158): Xaa can be any naturally occurring amino acid
  misc_feature (165)..(165): Xaa can be any naturally occurring amino acid
  misc_feature (168)..(170): Xaa can be any naturally occurring amino acid
  misc_feature (172)..(172): Xaa can be any naturally occurring amino acid
  misc_feature (175)..(175): Xaa can be any naturally occurring amino acid
  misc_feature (184)..(186): Xaa can be any naturally occurring amino acid
  misc_feature (188)..(188): Xaa can be any naturally occurring amino acid
  misc_feature (190)..(201): Xaa can be any naturally occurring amino acid
  misc_feature (203)..(885): Xaa can be any naturally occurring amino acid
XXXXXXXXXXXXXXXXXXXXXXXXXXXXXXXXXXXXXXXXXXXXXXXXXXXXXXXXXMSGXXVWVFXXNGVXRLVENXXXXXXXXXXXXXXXXXXXXXXXRRKXLVXXPXGEVVXSYXXLEXXXLXXLGWXERYXXXXXXXXXXXXXLXQXHKRXXSXDLISLPXDFXXXFXSVXMYDIVVKNXXXFXVXXXXXXXXXXXXDXXXXXXXXXXXXXXXXXXXXXXXXXXXXXXXXXXXXXXXXXXXXXXXXXXXXXXXXXXXXXXXXXXXXXXXXXXXXXXXXXXXXXXXXXXXXXXXXXXXXXXXXXXXXXXXXXXXXXXXXXXXXXXXXXXXXXXXXXXXXXXXXXXXXXXXXXXXXXXXXXXXXXXXXXXXXXXXXXXXXXXXXXXXXXXXXXXXXXXXXXXXXXXXXXXXXXXXXXXXXXXXXXXXXXXXXXXXXXXXXXXXXXXXXXXXXXXXXXXXXXXXXXXXXXXXXXXXXXXXXXXXXXXXXXXXXXXXXXXXXXXXXXXXXXXXXXXXXXXXXXXXXXXXXXXXXXXXXXXXXXXXXXXXXXXXXXXXXXXXXXXXXXXXXXXXXXXXXXXXXXXXXXXXXXXXXXXXXXXXXXXXXXXXXXXXXXXXXXXXXXXXXXXXXXXXXXXXXXXXXXXXXXXXXXXXXXXXXXXXXXXXXXXXXXXXXXXXXXXXXXXXXXXXXXXXXXXXXXXXXXXXXXXXXXXXXXXXXXXXXXXXXXXXXXXXXXXXXXXXXXXXXXXXXXXXXXXXXXXXXXXXXXXXXXXXXXXXXXXXXXXXXXXXXXXXXXXXXXXXXXXXXXXXXXXXXXXXXXXXXXXXXXXXXXXXXXXXXXXXXXXXXXXXXXXXXXXXXXXXXXXXXXXXXXXXXXXXXXXXXXXX

SEQ ID NO: 30385 - protein, 2346 aa, artificial
  consensus
  misc_feature (1)..(275): Xaa can be any naturally occurring amino acid
  misc_feature (277)..(279): Xaa can be any naturally occurring amino acid
  misc_feature (281)..(372): Xaa can be any naturally occurring amino acid
  misc_feature (375)..(377): Xaa can be any naturally occurring amino acid
  misc_feature (379)..(379): Xaa can be any naturally occurring amino acid
  misc_feature (382)..(383): Xaa can be any naturally occurring amino acid
  misc_feature (386)..(388): Xaa can be any naturally occurring amino acid
  misc_feature (391)..(393): Xaa can be any naturally occurring amino acid
  misc_feature (396)..(396): Xaa can be any naturally occurring amino acid
  misc_feature (398)..(398): Xaa can be any naturally occurring amino acid
  misc_feature (401)..(403): Xaa can be any naturally occurring amino acid
  misc_feature (406)..(414): Xaa can be any naturally occurring amino acid
  misc_feature (416)..(423): Xaa can be any naturally occurring amino acid
  misc_feature (425)..(428): Xaa can be any naturally occurring amino acid
  misc_feature (431)..(431): Xaa can be any naturally occurring amino acid
  misc_feature (433)..(439): Xaa can be any naturally occurring amino acid
  misc_feature (441)..(441): Xaa can be any naturally occurring amino acid
  misc_feature (446)..(446): Xaa can be any naturally occurring amino acid
  misc_feature (449)..(449): Xaa can be any naturally occurring amino acid
  misc_feature (454)..(454): Xaa can be any naturally occurring amino acid
  misc_feature (456)..(456): Xaa can be any naturally occurring amino acid
  misc_feature (458)..(459): Xaa can be any naturally occurring amino acid
  misc_feature (461)..(464): Xaa can be any naturally occurring amino acid
  misc_feature (466)..(469): Xaa can be any naturally occurring amino acid
  misc_feature (472)..(475): Xaa can be any naturally occurring amino acid
  misc_feature (480)..(482): Xaa can be any naturally occurring amino acid
  misc_feature (485)..(485): Xaa can be any naturally occurring amino acid
  misc_feature (488)..(505): Xaa can be any naturally occurring amino acid
  misc_feature (509)..(538): Xaa can be any naturally occurring amino acid
  misc_feature (541)..(541): Xaa can be any naturally occurring amino acid
  misc_feature (546)..(700): Xaa can be any naturally occurring amino acid
  misc_feature (703)..(705): Xaa can be any naturally occurring amino acid
  misc_feature (708)..(708): Xaa can be any naturally occurring amino acid
  misc_feature (710)..(2346): Xaa can be any naturally occurring amino acid
XXXXXXXXXXXXXXXXXXXXXXXXXXXXXXXXXXXXXXXXXXXXXXXXXXXXXXXXXXXXXXXXXXXXXXXXXXXXXXXXXXXXXXXXXXXXXXXXXXXXXXXXXXXXXXXXXXXXXXXXXXXXXXXXXXXXXXXXXXXXXXXXXXXXXXXXXXXXXXXXXXXXXXXXXXXXXXXXXXXXXXXXXXXXXXXXXXXXXXXXXXXXXXXXXXXXXXXXXXXXXXXXXXXXXXXXXXXXXXXXXXXXXXXXXXXXXXXXXXXXXXXXXXXXXXXXXXXLXXXGXXXXXXXXXXXXXXXXXXXXXXXXXXXXXXXXXXXXXXXXXXXXXXXXXXXXXXXXXXXXXXXXXXXXXXXXXXXXXXXXXXXXXXXXXXXXWVXXXVXEMXXASXXXDAXXXRAXRXLEXXXKSXXXXXXXXXAXXXXXXXXEXXXXLKXQXXXXXXXNXVLKRXAVXIQHEXRXKXXDXXXXEXXXXKQXXXXYQEQXXXLEXNNXXXXXXXXXXXXXXXXXXYALXXXXXXXXXXXXXXXXXXXXXXXXXXXXXXHLXQAQQXXXXXXXXXXXXXXXXXXXXXXXXXXXXXXXXXXXXXXXXXXXXXXXXXXXXXXXXXXXXXXXXXXXXXXXXXXXXXXXXXXXXXXXXXXXXXXXXXXXXXXXXXXXXXXXXXXXXXXXXXXXXXXXXXXXXXXXXXXXXXXXXXXXXXXXXXXXPGXXXPDXFXXXXXXXXXXXXXXXXXXXXXXXXXXXXXXXXXXXXXXXXXXXXXXXXXXXXXXXXXXXXXXXXXXXXXXXXXXXXXXXXXXXXXXXXXXXXXXXXXXXXXXXXXXXXXXXXXXXXXXXXXXXXXXXXXXXXXXXXXXXXXXXXXXXXXXXXXXXXXXXXXXXXXXXXXXXXXXXXXXXXXXXXXXXXXXXXXXXXXXXXXXXXXXXXXXXXXXXXXXXXXXXXXXXXXXXXXXXXXXXXXXXXXXXXXXXXXXXXXXXXXXXXXXXXXXXXXXXXXXXXXXXXXXXXXXXXXXXXXXXXXXXXXXXXXXXXXXXXXXXXXXXXXXXXXXXXXXXXXXXXXXXXXXXXXXXXXXXXXXXXXXXXXXXXXXXXXXXXXXXXXXXXXXXXXXXXXXXXXXXXXXXXXXXXXXXXXXXXXXXXXXXXXXXXXXXXXXXXXXXXXXXXXXXXXXXXXXXXXXXXXXXXXXXXXXXXXXXXXXXXXXXXXXXXXXXXXXXXXXXXXXXXXXXXXXXXXXXXXXXXXXXXXXXXXXXXXXXXXXXXXXXXXXXXXXXXXXXXXXXXXXXXXXXXXXXXXXXXXXXXXXXXXXXXXXXXXXXXXXXXXXXXXXXXXXXXXXXXXXXXXXXXXXXXXXXXXXXXXXXXXXXXXXXXXXXXXXXXXXXXXXXXXXXXXXXXXXXXXXXXXXXXXXXXXXXXXXXXXXXXXXXXXXXXXXXXXXXXXXXXXXXXXXXXXXXXXXXXXXXXXXXXXXXXXXXXXXXXXXXXXXXXXXXXXXXXXXXXXXXXXXXXXXXXXXXXXXXXXXXXXXXXXXXXXXXXXXXXXXXXXXXXXXXXXXXXXXXXXXXXXXXXXXXXXXXXXXXXXXXXXXXXXXXXXXXXXXXXXXXXXXXXXXXXXXXXXXXXXXXXXXXXXXXXXXXXXXXXXXXXXXXXXXXXXXXXXXXXXXXXXXXXXXXXXXXXXXXXXXXXXXXXXXXXXXXXXXXXXXXXXXXXXXXXXXXXXXXXXXXXXXXXXXXXXXXXXXXXXXXXXXXXXXXXXXXXXXXXXXXXXXXXXXXXXXXXXXXXXXXXXXXXXXXXXXXXXXXXXXXXXXXXXXXXXXXXXXXXXXXXXXXXXXXXXXXXXXXXXXXXXXXXXXXXXXXXXXXXXXXXXXXXXXXXXXXXXXXXXXXXXXXXXXXXXXXXXXXXXXXXXXXXXXXXXXXXXXXXXXXXXXXXXXXXXXXXXXXXXXXXXXXXXXXXXXXXXXXXXXXXXXXXXXXXXXXXXXXXXXXXXXXXXXXXXXXXXXXXXXXXXXXXXXXXXXXXXXXXXXXXXXXXXXXXXXXXXXXXXXXXXXXXXXXXXXXXXXXXXXXXXXXXXXXXXXXXXXXXXXXXXXXXXXXXXXXXXXXXXXXXXXXXXXXXXXXXXXXXXXXXXXXXXXXXXXXXXXXXXXXXXXXXXXXXXXXXXXXXXXXXXXXXXXXXXXXXXXXXXXXXXXXXXXXXXXXXXXXXXXXXXXXXXXXXXXXXXXXXXXXXXXXXXXXXXXXXXXXXXXXXXXXXXXXXXXXXXXXXXXXXXXXXXXXXXXXXXXXXXXXXXXXXXXXXXXXXXXXXXXXXXXXXXXXXXXXXXXXXXXXXXXXXXXXXXXXXXXXXXXXXXXXXXXXXXXXXXXXXX

SEQ ID NO: 30386 - protein, 438 aa, artificial
  consensus
  misc_feature (1)..(78): Xaa can be any naturally occurring amino acid
  misc_feature (80)..(86): Xaa can be any naturally occurring amino acid
  misc_feature (89)..(92): Xaa can be any naturally occurring amino acid
  misc_feature (96)..(106): Xaa can be any naturally occurring amino acid
  misc_feature (108)..(112): Xaa can be any naturally occurring amino acid
  misc_feature (114)..(115): Xaa can be any naturally occurring amino acid
  misc_feature (117)..(119): Xaa can be any naturally occurring amino acid
  misc_feature (121)..(121): Xaa can be any naturally occurring amino acid
  misc_feature (132)..(132): Xaa can be any naturally occurring amino acid
  misc_feature (158)..(158): Xaa can be any naturally occurring amino acid
  misc_feature (167)..(168): Xaa can be any naturally occurring amino acid
  misc_feature (170)..(171): Xaa can be any naturally occurring amino acid
  misc_feature (178)..(178): Xaa can be any naturally occurring amino acid
  misc_feature (181)..(184): Xaa can be any naturally occurring amino acid
  misc_feature (186)..(188): Xaa can be any naturally occurring amino acid
  misc_feature (190)..(190): Xaa can be any naturally occurring amino acid
  misc_feature (195)..(195): Xaa can be any naturally occurring amino acid
  misc_feature (198)..(198): Xaa can be any naturally occurring amino acid
  misc_feature (204)..(204): Xaa can be any naturally occurring amino acid
  misc_feature (210)..(210): Xaa can be any naturally occurring amino acid
  misc_feature (214)..(214): Xaa can be any naturally occurring amino acid
  misc_feature (219)..(219): Xaa can be any naturally occurring amino acid
  misc_feature (224)..(224): Xaa can be any naturally occurring amino acid
  misc_feature (234)..(234): Xaa can be any naturally occurring amino acid
  misc_feature (239)..(240): Xaa can be any naturally occurring amino acid
  misc_feature (244)..(244): Xaa can be any naturally occurring amino acid
  misc_feature (249)..(249): Xaa can be any naturally occurring amino acid
  misc_feature (251)..(251): Xaa can be any naturally occurring amino acid
  misc_feature (254)..(255): Xaa can be any naturally occurring amino acid
  misc_feature (261)..(261): Xaa can be any naturally occurring amino acid
  misc_feature (266)..(305): Xaa can be any naturally occurring amino acid
  misc_feature (307)..(307): Xaa can be any naturally occurring amino acid
  misc_feature (309)..(312): Xaa can be any naturally occurring amino acid
  misc_feature (319)..(319): Xaa can be any naturally occurring amino acid
  misc_feature (322)..(322): Xaa can be any naturally occurring amino acid
  misc_feature (326)..(326): Xaa can be any naturally occurring amino acid
  misc_feature (328)..(332): Xaa can be any naturally occurring amino acid
  misc_feature (334)..(335): Xaa can be any naturally occurring amino acid
  misc_feature (337)..(342): Xaa can be any naturally occurring amino acid
  misc_feature (344)..(346): Xaa can be any naturally occurring amino acid
  misc_feature (348)..(351): Xaa can be any naturally occurring amino acid
  misc_feature (353)..(353): Xaa can be any naturally occurring amino acid
  misc_feature (370)..(370): Xaa can be any naturally occurring amino acid
  misc_feature (376)..(376): Xaa can be any naturally occurring amino acid
  misc_feature (379)..(379): Xaa can be any naturally occurring amino acid
  misc_feature (386)..(386): Xaa can be any naturally occurring amino acid
  misc_feature (404)..(405): Xaa can be any naturally occurring amino acid
  misc_feature (410)..(410): Xaa can be any naturally occurring amino acid
  misc_feature (412)..(412): Xaa can be any naturally occurring amino acid
  misc_feature (415)..(416): Xaa can be any naturally occurring amino acid
  misc_feature (420)..(421): Xaa can be any naturally occurring amino acid
  misc_feature (427)..(438): Xaa can be any naturally occurring amino acid
XXXXXXXXXXXXXXXXXXXXXXXXXXXXXXXXXXXXXXXXXXXXXXXXXXXXXXXXXXXXXXXXXXXXXXXXXXXXXXMXXXXXXXGGXXXXGGGXXXXXXXXXXXGXXXXXGXXGXXXGXDVELVSKTLQXEHKLFYFDLKENPRGRYLKISEKTSXTRSTIIVPXXGXXWFLDLFXYYXXXXEXXXFXSKELXLDXKVFYFXDIGENXRGRXLKVSXEASVXRNRSTIIVPXAGSSXXEGWXAFRNXLXEIXXEASRLXVLPNXXXXXXXXXXXXXXXXXXXXXXXXXXXXXXXXXXXXXXXXEXLXXXXDDVGAGXFIXGHGXQXXXXXEXXVXXXXXXPXXXEXXXXGXSKVIRADQKRFFFDLGXNNRGHXLRXISEVAGXDRSSIILPLSGLKQFHEXXGHFVXIXKDXXEGMXXANVRTXXXXXXXXXXXX

SEQ ID NO: 30387 - protein, 911 aa, artificial
  consensus
  misc_feature (1)..(69): Xaa can be any naturally occurring amino acid
  misc_feature (71)..(72): Xaa can be any naturally occurring amino acid
  misc_feature (75)..(76): Xaa can be any naturally occurring amino acid
  misc_feature (78)..(78): Xaa can be any naturally occurring amino acid
  misc_feature (80)..(85): Xaa can be any naturally occurring amino acid
  misc_feature (88)..(93): Xaa can be any naturally occurring amino acid
  misc_feature (95)..(99): Xaa can be any naturally occurring amino acid
  misc_feature (101)..(102): Xaa can be any naturally occurring amino acid
  misc_feature (104)..(109): Xaa can be any naturally occurring amino acid
  misc_feature (113)..(113): Xaa can be any naturally occurring amino acid
  misc_feature (115)..(115): Xaa can be any naturally occurring amino acid
  misc_feature (117)..(117): Xaa can be any naturally occurring amino acid
  misc_feature (120)..(123): Xaa can be any naturally occurring amino acid
  misc_feature (125)..(128): Xaa can be any naturally occurring amino acid
  misc_feature (130)..(132): Xaa can be any naturally occurring amino acid
  misc_feature (134)..(135): Xaa can be any naturally occurring amino acid
  misc_feature (137)..(140): Xaa can be any naturally occurring amino acid
  misc_feature (142)..(143): Xaa can be any naturally occurring amino acid
  misc_feature (147)..(149): Xaa can be any naturally occurring amino acid
  misc_feature (151)..(151): Xaa can be any naturally occurring amino acid
  misc_feature (153)..(157): Xaa can be any naturally occurring amino acid
  misc_feature (159)..(161): Xaa can be any naturally occurring amino acid
  misc_feature (164)..(166): Xaa can be any naturally occurring amino acid
  misc_feature (169)..(171): Xaa can be any naturally occurring amino acid
  misc_feature (174)..(175): Xaa can be any naturally occurring amino acid
  misc_feature (179)..(180): Xaa can be any naturally occurring amino acid
  misc_feature (183)..(183): Xaa can be any naturally occurring amino acid
  misc_feature (185)..(187): Xaa can be any naturally occurring amino acid
  misc_feature (189)..(202): Xaa can be any naturally occurring amino acid
  misc_feature (204)..(225): Xaa can be any naturally occurring amino acid
  misc_feature (227)..(251): Xaa can be any naturally occurring amino acid
  misc_feature (253)..(253): Xaa can be any naturally occurring amino acid
  misc_feature (255)..(260): Xaa can be any naturally occurring amino acid
  misc_feature (262)..(275): Xaa can be any naturally occurring amino acid
  misc_feature (277)..(282): Xaa can be any naturally occurring amino acid
  misc_feature (285)..(286): Xaa can be any naturally occurring amino acid
  misc_feature (288)..(289): Xaa can be any naturally occurring amino acid
  misc_feature (291)..(302): Xaa can be any naturally occurring amino acid
  misc_feature (306)..(308): Xaa can be any naturally occurring amino acid
  misc_feature (310)..(313): Xaa can be any naturally occurring amino acid
  misc_feature (315)..(316): Xaa can be any naturally occurring amino acid
  misc_feature (318)..(321): Xaa can be any naturally occurring amino acid
  misc_feature (323)..(324): Xaa can be any naturally occurring amino acid
  misc_feature (326)..(345): Xaa can be any naturally occurring amino acid
  misc_feature (347)..(350): Xaa can be any naturally occurring amino acid
  misc_feature (353)..(354): Xaa can be any naturally occurring amino acid
  misc_feature (359)..(361): Xaa can be any naturally occurring amino acid
  misc_feature (364)..(365): Xaa can be any naturally occurring amino acid
  misc_feature (368)..(371): Xaa can be any naturally occurring amino acid
  misc_feature (374)..(390): Xaa can be any naturally occurring amino acid
  misc_feature (392)..(393): Xaa can be any naturally occurring amino acid
  misc_feature (395)..(395): Xaa can be any naturally occurring amino acid
  misc_feature (397)..(417): Xaa can be any naturally occurring amino acid
  misc_feature (419)..(419): Xaa can be any naturally occurring amino acid
  misc_feature (421)..(421): Xaa can be any naturally occurring amino acid
  misc_feature (423)..(424): Xaa can be any naturally occurring amino acid
  misc_feature (426)..(426): Xaa can be any naturally occurring amino acid
  misc_feature (430)..(430): Xaa can be any naturally occurring amino acid
  misc_feature (433)..(434): Xaa can be any naturally occurring amino acid
  misc_feature (439)..(439): Xaa can be any naturally occurring amino acid
  misc_feature (441)..(442): Xaa can be any naturally occurring amino acid
  misc_feature (445)..(446): Xaa can be any naturally occurring amino acid
  misc_feature (448)..(451): Xaa can be any naturally occurring amino acid
  misc_feature (454)..(454): Xaa can be any naturally occurring amino acid
  misc_feature (456)..(460): Xaa can be any naturally occurring amino acid
  misc_feature (465)..(465): Xaa can be any naturally occurring amino acid
  misc_feature (467)..(467): Xaa can be any naturally occurring amino acid
  misc_feature (472)..(475): Xaa can be any naturally occurring amino acid
  misc_feature (477)..(478): Xaa can be any naturally occurring amino acid
  misc_feature (481)..(486): Xaa can be any naturally occurring amino acid
  misc_feature (488)..(490): Xaa can be any naturally occurring amino acid
  misc_feature (493)..(496): Xaa can be any naturally occurring amino acid
  misc_feature (498)..(499): Xaa can be any naturally occurring amino acid
  misc_feature (502)..(502): Xaa can be any naturally occurring amino acid
  misc_feature (504)..(505): Xaa can be any naturally occurring amino acid
  misc_feature (511)..(511): Xaa can be any naturally occurring amino acid
  misc_feature (513)..(514): Xaa can be any naturally occurring amino acid
  misc_feature (516)..(518): Xaa can be any naturally occurring amino acid
  misc_feature (524)..(524): Xaa can be any naturally occurring amino acid
  misc_feature (526)..(527): Xaa can be any naturally occurring amino acid
  misc_feature (529)..(531): Xaa can be any naturally occurring amino acid
  misc_feature (533)..(535): Xaa can be any naturally occurring amino acid
  misc_feature (537)..(539): Xaa can be any naturally occurring amino acid
  misc_feature (541)..(543): Xaa can be any naturally occurring amino acid
  misc_feature (545)..(911): Xaa can be any naturally occurring amino acid
XXXXXXXXXXXXXXXXXXXXXXXXXXXXXXXXXXXXXXXXXXXXXXXXXXXXXXXXXXXXXXXXXXXXXRXXPGXXGXPXXXXXXDRXXXXXXQXXXXXFXXRXXXXXXSTVXRXNXPPXXXXFXXXXPXXXAXXDXXXXFXXLFDXXXVXKXXXXXGXXXPSXXXTGXXXRVXXYLDXXEPXHXXXKXXXXXXXXXXXXXXLXXXXXXXXXXXXXXXXXXXXXXEXXXXXXXXXXXXXXXXXXXXXXXXXFXFXXXXXXGXXXXXXXXXXXXXXGXXXXXXWLXXQXXPXXXXXXXXXXXXLEEXXXHXXXXPXXLXXXXYXXLXXXXXXXXXXXXXXXXXXXXGXXXXEAXXNLLFXXXFNXXGGXXXXLPXXXXXXXXXXXXXXXXXLXXEXRXXXXXXXXXXXXXXXXXXXXXEXMXLXXSXVYEXLRXXPPVPXQXXRAXXDXXXXSHXDXXXXXKKGEXLXGYQPXXXXDXXVFXXXXXXFXXXRFXXXXGXXLLXYXXWSNGPXTXXPXXXNKQCAXKXXVXXXAXXXVXXXFXXXYXXXXXXXXXXXXXXXXXXXXXXXXXXXXXXXXXXXXXXXXXXXXXXXXXXXXXXXXXXXXXXXXXXXXXXXXXXXXXXXXXXXXXXXXXXXXXXXXXXXXXXXXXXXXXXXXXXXXXXXXXXXXXXXXXXXXXXXXXXXXXXXXXXXXXXXXXXXXXXXXXXXXXXXXXXXXXXXXXXXXXXXXXXXXXXXXXXXXXXXXXXXXXXXXXXXXXXXXXXXXXXXXXXXXXXXXXXXXXXXXXXXXXXXXXXXXXXXXXXXXXXXXXXXXXXXXXXXXXXXXXXXXXXXXXXXXXXXXXXXXXXXXXXXXXXXXXXXXXXXXXXXXXXXXXXXXXXXXXXXXXXXXXXXXXXXXXXXXXXXXXXXXXXX

SEQ ID NO: 30388 - protein, 911 aa, artificial; identical to SEQ ID NO: 30387
  consensus
  misc_feature (1)..(69): Xaa can be any naturally occurring amino acid
  misc_feature (71)..(72): Xaa can be any naturally occurring amino acid
  misc_feature (75)..(76): Xaa can be any naturally occurring amino acid
  misc_feature (78)..(78): Xaa can be any naturally occurring amino acid
  misc_feature (80)..(85): Xaa can be any naturally occurring amino acid
  misc_feature (88)..(93): Xaa can be any naturally occurring amino acid
  misc_feature (95)..(99): Xaa can be any naturally occurring amino acid
  misc_feature (101)..(102): Xaa can be any naturally occurring amino acid
  misc_feature (104)..(109): Xaa can be any naturally occurring amino acid
  misc_feature (113)..(113): Xaa can be any naturally occurring amino acid
  misc_feature (115)..(115): Xaa can be any naturally occurring amino acid
  misc_feature (117)..(117): Xaa can be any naturally occurring amino acid
  misc_feature (120)..(123): Xaa can be any naturally occurring amino acid
  misc_feature (125)..(128): Xaa can be any naturally occurring amino acid
  misc_feature (130)..(132): Xaa can be any naturally occurring amino acid
  misc_feature (134)..(135): Xaa can be any naturally occurring amino acid
  misc_feature (137)..(140): Xaa can be any naturally occurring amino acid
  misc_feature (142)..(143): Xaa can be any naturally occurring amino acid
  misc_feature (147)..(149): Xaa can be any naturally occurring amino acid
  misc_feature (151)..(151): Xaa can be any naturally occurring amino acid
  misc_feature (153)..(157): Xaa can be any naturally occurring amino acid
  misc_feature (159)..(161): Xaa can be any naturally occurring amino acid
  misc_feature (164)..(166): Xaa can be any naturally occurring amino acid
  misc_feature (169)..(171): Xaa can be any naturally occurring amino acid
  misc_feature (174)..(175): Xaa can be any naturally occurring amino acid
  misc_feature (179)..(180): Xaa can be any naturally occurring amino acid
  misc_feature (183)..(183): Xaa can be any naturally occurring amino acid
  misc_feature (185)..(187): Xaa can be any naturally occurring amino acid
  misc_feature (189)..(202): Xaa can be any naturally occurring amino acid
  misc_feature (204)..(225): Xaa can be any naturally occurring amino acid
  misc_feature (227)..(251): Xaa can be any naturally occurring amino acid
  misc_feature (253)..(253): Xaa can be any naturally occurring amino acid
  misc_feature (255)..(260): Xaa can be any naturally occurring amino acid
  misc_feature (262)..(275): Xaa can be any naturally occurring amino acid
  misc_feature (277)..(282): Xaa can be any naturally occurring amino acid
  misc_feature (285)..(286): Xaa can be any naturally occurring amino acid
  misc_feature (288)..(289): Xaa can be any naturally occurring amino acid
  misc_feature (291)..(302): Xaa can be any naturally occurring amino acid
  misc_feature (306)..(308): Xaa can be any naturally occurring amino acid
  misc_feature (310)..(313): Xaa can be any naturally occurring amino acid
  misc_feature (315)..(316): Xaa can be any naturally occurring amino acid
  misc_feature (318)..(321): Xaa can be any naturally occurring amino acid
  misc_feature (323)..(324): Xaa can be any naturally occurring amino acid
  misc_feature (326)..(345): Xaa can be any naturally occurring amino acid
  misc_feature (347)..(350): Xaa can be any naturally occurring amino acid
  misc_feature (353)..(354): Xaa can be any naturally occurring amino acid
  misc_feature (359)..(361): Xaa can be any naturally occurring amino acid
  misc_feature (364)..(365): Xaa can be any naturally occurring amino acid
  misc_feature (368)..(371): Xaa can be any naturally occurring amino acid
  misc_feature (374)..(390): Xaa can be any naturally occurring amino acid
  misc_feature (392)..(393): Xaa can be any naturally occurring amino acid
  misc_feature (395)..(395): Xaa can be any naturally occurring amino acid
  misc_feature (397)..(417): Xaa can be any naturally occurring amino acid
  misc_feature (419)..(419): Xaa can be any naturally occurring amino acid
  misc_feature (421)..(421): Xaa can be any naturally occurring amino acid
  misc_feature (423)..(424): Xaa can be any naturally occurring amino acid
  misc_feature (426)..(426): Xaa can be any naturally occurring amino acid
  misc_feature (430)..(430): Xaa can be any naturally occurring amino acid
  misc_feature (433)..(434): Xaa can be any naturally occurring amino acid
  misc_feature (439)..(439): Xaa can be any naturally occurring amino acid
  misc_feature (441)..(442): Xaa can be any naturally occurring amino acid
  misc_feature (445)..(446): Xaa can be any naturally occurring amino acid
  misc_feature (448)..(451): Xaa can be any naturally occurring amino acid
  misc_feature (454)..(454): Xaa can be any naturally occurring amino acid
  misc_feature (456)..(460): Xaa can be any naturally occurring amino acid
  misc_feature (465)..(465): Xaa can be any naturally occurring amino acid
  misc_feature (467)..(467): Xaa can be any naturally occurring amino acid
  misc_feature (472)..(475): Xaa can be any naturally occurring amino acid
  misc_feature (477)..(478): Xaa can be any naturally occurring amino acid
  misc_feature (481)..(486): Xaa can be any naturally occurring amino acid
  misc_feature (488)..(490): Xaa can be any naturally occurring amino acid
  misc_feature (493)..(496): Xaa can be any naturally occurring amino acid
  misc_feature (498)..(499): Xaa can be any naturally occurring amino acid
  misc_feature (502)..(502): Xaa can be any naturally occurring amino acid
  misc_feature (504)..(505): Xaa can be any naturally occurring amino acid
  misc_feature (511)..(511): Xaa can be any naturally occurring amino acid
  misc_feature (513)..(514): Xaa can be any naturally occurring amino acid
  misc_feature (516)..(518): Xaa can be any naturally occurring amino acid
  misc_feature (524)..(524): Xaa can be any naturally occurring amino acid
  misc_feature (526)..(527): Xaa can be any naturally occurring amino acid
  misc_feature (529)..(531): Xaa can be any naturally occurring amino acid
  misc_feature (533)..(535): Xaa can be any naturally occurring amino acid
  misc_feature (537)..(539): Xaa can be any naturally occurring amino acid
  misc_feature (541)..(543): Xaa can be any naturally occurring amino acid
  misc_feature (545)..(911): Xaa can be any naturally occurring amino acid

SEQ ID NO: 30389 - protein, 731 aa, artificial
  consensus
  misc_feature (1)..(81): Xaa can be any naturally occurring amino acid
  misc_feature (83)..(88): Xaa can be any naturally occurring amino acid
  misc_feature (90)..(93): Xaa can be any naturally occurring amino acid
  misc_feature (95)..(99): Xaa can be any naturally occurring amino acid
  misc_feature (101)..(114): Xaa can be any naturally occurring amino acid
  misc_feature (117)..(117): Xaa can be any naturally occurring amino acid
  misc_feature (120)..(121): Xaa can be any naturally occurring amino acid
  misc_feature (123)..(124): Xaa can be any naturally occurring amino acid
  misc_feature (127)..(132): Xaa can be any naturally occurring amino acid
  misc_feature (134)..(138): Xaa can be any naturally occurring amino acid
  misc_feature (141)..(141): Xaa can be any naturally occurring amino acid
  misc_feature (143)..(143): Xaa can be any naturally occurring amino acid
  misc_feature (145)..(150): Xaa can be any naturally occurring amino acid
  misc_feature (152)..(154): Xaa can be any naturally occurring amino acid
  misc_feature (157)..(157): Xaa can be any naturally occurring amino acid
  misc_feature (159)..(159): Xaa can be any naturally occurring amino acid
  misc_feature (161)..(161): Xaa can be any naturally occurring amino acid
  misc_feature (163)..(163): Xaa can be any naturally occurring amino acid
  misc_feature (166)..(168): Xaa can be any naturally occurring amino acid
  misc_feature (170)..(172): Xaa can be any naturally occurring amino acid
  misc_feature (174)..(174): Xaa can be any naturally occurring amino acid
  misc_feature (176)..(178): Xaa can be any naturally occurring amino acid
  misc_feature (181)..(181): Xaa can be any naturally occurring amino acid
  misc_feature (184)..(186): Xaa can be any naturally occurring amino acid
  misc_feature (189)..(190): Xaa can be any naturally occurring amino acid
  misc_feature (193)..(213): Xaa can be any naturally occurring amino acid
  misc_feature (215)..(217): Xaa can be any naturally occurring amino acid
  misc_feature (219)..(220): Xaa can be any naturally occurring amino acid
  misc_feature (223)..(223): Xaa can be any naturally occurring amino acid
  misc_feature (225)..(225): Xaa can be any naturally occurring amino acid
  misc_feature (227)..(228): Xaa can be any naturally occurring amino acid
  misc_feature (230)..(231): Xaa can be any naturally occurring amino acid
  misc_feature (236)..(236): Xaa can be any naturally occurring amino acid
  misc_feature (239)..(240): Xaa can be any naturally occurring amino acid
  misc_feature (242)..(244): Xaa can be any naturally occurring amino acid
  misc_feature (246)..(246): Xaa can be any naturally occurring amino acid
  misc_feature (250)..(251): Xaa can be any naturally occurring amino acid
  misc_feature (254)..(254): Xaa can be any naturally occurring amino acid
  misc_feature (257)..(257): Xaa can be any naturally occurring amino acid
  misc_feature (260)..(262): Xaa can be any naturally occurring amino acid
  misc_feature (265)..(265): Xaa can be any naturally occurring amino acid
  misc_feature (267)..(267): Xaa can be any naturally occurring amino acid
  misc_feature (269)..(269): Xaa can be any naturally occurring amino acid
  misc_feature (271)..(276): Xaa can be any naturally occurring amino acid
  misc_feature (278)..(281): Xaa can be any naturally occurring amino acid
  misc_feature (283)..(284): Xaa can be any naturally occurring amino acid
  misc_feature (286)..(301): Xaa can be any naturally occurring amino acid
  misc_feature (303)..(305): Xaa can be any naturally occurring amino acid
  misc_feature (307)..(308): Xaa can be any naturally occurring amino acid
  misc_feature (310)..(310): Xaa can be any naturally occurring amino acid
  misc_feature (313)..(313): Xaa can be any naturally occurring amino acid
  misc_feature (315)..(316): Xaa can be any naturally occurring amino acid
  misc_feature (319)..(731): Xaa can be any naturally occurring amino acid
XXXXXXXXXXXXXXXXXXXXXXXXXXXXXXXXXXXXXXXXXXXXXXXXXXXXXXXXXXXXXXXXXXXXXXXXXXXXXXXXXVXXXXXXEXXXXSXXXXXKXXXXXXXXXXXXXXQEXWKXXLXXFKXXXXXXQXXXXXAYXVXSXXXXXXLXXXSEXLXIXAXKAXXXLXXXAXEXXXEGXEYXXXAAXXSPXXXXXXXXXXXXXXXXXXXXXSXXXDXXVGXPXGXXLXXGGFLXFMXXGXXXAXRFGXXLGXALXALXXXSLXSXRXGXXXXXXLXXXXAXXAXXXXXXXXXXXXXXXXFXXXFXXLXSGXVXXFYXXXXXXXXXXXXXXXXXXXXXXXXXXXXXXXXXXXXXXXXXXXXXXXXXXXXXXXXXXXXXXXXXXXXXXXXXXXXXXXXXXXXXXXXXXXXXXXXXXXXXXXXXXXXXXXXXXXXXXXXXXXXXXXXXXXXXXXXXXXXXXXXXXXXXXXXXXXXXXXXXXXXXXXXXXXXXXXXXXXXXXXXXXXXXXXXXXXXXXXXXXXXXXXXXXXXXXXXXXXXXXXXXXXXXXXXXXXXXXXXXXXXXXXXXXXXXXXXXXXXXXXXXXXXXXXXXXXXXXXXXXXXXXXXXXXXXXXXXXXXXXXXXXXXXXXXXXXXXXXXXXXXXXXXXXXXXXXXXXXXXXXXXXXXXXXXXXXXXXXXXXXXXXXXXXXXXXXXXXXXXXXXXXXXXXXXXXXXXXXXXXXXXXXXXXXXX

SEQ ID NO: 30390 - protein, 283 aa, artificial
  consensus
  misc_feature (1)..(149): Xaa can be any naturally occurring amino acid
  misc_feature (152)..(152): Xaa can be any naturally occurring amino acid
  misc_feature (154)..(155): Xaa can be any naturally occurring amino acid
  misc_feature (157)..(158): Xaa can be any naturally occurring amino acid
  misc_feature (160)..(160): Xaa can be any naturally occurring amino acid
  misc_feature (162)..(163): Xaa can be any naturally occurring amino acid
  misc_feature (165)..(166): Xaa can be any naturally occurring amino acid
  misc_feature (169)..(169): Xaa can be any naturally occurring amino acid
  misc_feature (171)..(173): Xaa can be any naturally occurring amino acid
  misc_feature (178)..(178): Xaa can be any naturally occurring amino acid
  misc_feature (190)..(190): Xaa can be any naturally occurring amino acid
  misc_feature (208)..(208): Xaa can be any naturally occurring amino acid
  misc_feature (220)..(220): Xaa can be any naturally occurring amino acid
  misc_feature (231)..(231): Xaa can be any naturally occurring amino acid
  misc_feature (246)..(283): Xaa can be any naturally occurring amino acid
XXXXXXXXXXXXXXXXXXXXXXXXXXXXXXXXXXXXXXXXXXXXXXXXXXXXXXXXXXXXXXXXXXXXXXXXXXXXXXXXXXXXXXXXXXXXXXXXXXXXXXXXXXXXXXXXXXXXXXXXXXXXXXXXXXXXXXXXXXXXXXXXXXXXXALXKXXKXXKXPXXRXXKKXMXXXLAEFXKINKKLGIRKEXLPKIEEELELEIAKSELXELKKECVEAMEXQLKREEFKDEXEMPDVKKLDIRNFLXXXXXXXXXXXXXXXXXXXXXXXXXXXXXXXXXXXXXX

SEQ ID NO: 30391 - protein, 544 aa, artificial
  consensus
  misc_feature (1)..(78): Xaa can be any naturally occurring amino acid
  misc_feature (80)..(82): Xaa can be any naturally occurring amino acid
  misc_feature (86)..(88): Xaa can be any naturally occurring amino acid
  misc_feature (91)..(91): Xaa can be any naturally occurring amino acid
  misc_feature (93)..(94): Xaa can be any naturally occurring amino acid
  misc_feature (96)..(96): Xaa can be any naturally occurring amino acid
  misc_feature (98)..(98): Xaa can be any naturally occurring amino acid
  misc_feature (102)..(103): Xaa can be any naturally occurring amino acid
  misc_feature (106)..(107): Xaa can be any naturally occurring amino acid
  misc_feature (112)..(113): Xaa can be any naturally occurring amino acid
  misc_feature (116)..(121): Xaa can be any naturally occurring amino acid
  misc_feature (124)..(124): Xaa can be any naturally occurring amino acid
  misc_feature (126)..(126): Xaa can be any naturally occurring amino acid
  misc_feature (129)..(129): Xaa can be any naturally occurring amino acid
  misc_feature (133)..(133): Xaa can be any naturally occurring amino acid
  misc_feature (135)..(136): Xaa can be any naturally occurring amino acid
  misc_feature (142)..(142): Xaa can be any naturally occurring amino acid
  misc_feature (149)..(149): Xaa can be any naturally occurring amino acid
  misc_feature (152)..(152): Xaa can be any naturally occurring amino acid
  misc_feature (154)..(155): Xaa can be any naturally occurring amino acid
  misc_feature (158)..(159): Xaa can be any naturally occurring amino acid
  misc_feature (169)..(171): Xaa can be any naturally occurring amino acid
  misc_feature (173)..(181): Xaa can be any naturally occurring amino acid
  misc_feature (184)..(187): Xaa can be any naturally occurring amino acid
  misc_feature (189)..(189): Xaa can be any naturally occurring amino acid
  misc_feature (191)..(193): Xaa can be any naturally occurring amino acid
  misc_feature (195)..(195): Xaa can be any naturally occurring amino acid
  misc_feature (197)..(197): Xaa can be any naturally occurring amino acid
  misc_feature (199)..(250): Xaa can be any naturally occurring amino acid
  misc_feature (252)..(256): Xaa can be any naturally occurring amino acid
  misc_feature (258)..(258): Xaa can be any naturally occurring amino acid
  misc_feature (260)..(260): Xaa can be any naturally occurring amino acid
  misc_feature (262)..(544): Xaa can be any naturally occurring amino acid
XXXXXXXXXXXXXXXXXXXXXXXXXXXXXXXXXXXXXXXXXXXXXXXXXXXXXXXXXXXXXXXXXXXXXXXXXXXXXXKXXXHTSXXXGAXKXXEXLXGHEXXCKXXFRMEXXIFXXXXXXLRXEXLLXDTRXVXXEEQLGXFMYMISXNAXNXXLQXXFQHSGETIHXXXRXXXXXXXXXVFXXXXPXLXXXFXKXPXXXXXXXXXXXXXXXXXXXXXXXXXXXXXXXXXXXXXXXXXXXXXXXXXXXXIXXXXXFXPXFXXXXXXXXXXXXXXXXXXXXXXXXXXXXXXXXXXXXXXXXXXXXXXXXXXXXXXXXXXXXXXXXXXXXXXXXXXXXXXXXXXXXXXXXXXXXXXXXXXXXXXXXXXXXXXXXXXXXXXXXXXXXXXXXXXXXXXXXXXXXXXXXXXXXXXXXXXXXXXXXXXXXXXXXXXXXXXXXXXXXXXXXXXXXXXXXXXXXXXXXXXXXXXXXXXXXXXXXXXXXXXXXXXXXXXXXXXXXXXXXXXXXXXXXXXXXXXXXXXXXXXXXXXXXXXXXXXXXXXXXXXX

SEQ ID NO: 30392 - protein, 2341 aa, artificial
  consensus
  misc_feature (1)..(2022): Xaa can be any naturally occurring amino acid
  misc_feature (2024)..(2027): Xaa can be any naturally occurring amino acid
  misc_feature (2029)..(2031): Xaa can be any naturally occurring amino acid
  misc_feature (2033)..(2035): Xaa can be any naturally occurring amino acid
  misc_feature (2037)..(2044): Xaa can be any naturally occurring amino acid
  misc_feature (2046)..(2046): Xaa can be any naturally occurring amino acid
  misc_feature (2049)..(2055): Xaa can be any naturally occurring amino acid
  misc_feature (2057)..(2061): Xaa can be any naturally occurring amino acid
  misc_feature (2063)..(2063): Xaa can be any naturally occurring amino acid
  misc_feature (2065)..(2065): Xaa can be any naturally occurring amino acid
  misc_feature (2067)..(2074): Xaa can be any naturally occurring amino acid
  misc_feature (2076)..(2080): Xaa can be any naturally occurring amino acid
  misc_feature (2082)..(2082): Xaa can be any naturally occurring amino acid
  misc_feature (2084)..(2086): Xaa can be any naturally occurring amino acid
  misc_feature (2088)..(2088): Xaa can be any naturally occurring amino acid
  misc_feature (2090)..(2093): Xaa can be any naturally occurring amino acid
  misc_feature (2100)..(2100): Xaa can be any naturally occurring amino acid
  misc_feature (2103)..(2103): Xaa can be any naturally occurring amino acid
  misc_feature (2106)..(2106): Xaa can be any naturally occurring amino acid
  misc_feature (2108)..(2108): Xaa can be any naturally occurring amino acid
  misc_feature (2112)..(2112): Xaa can be any naturally occurring amino acid
  misc_feature (2114)..(2114): Xaa can be any naturally occurring amino acid
  misc_feature (2118)..(2119): Xaa can be any naturally occurring amino acid
  misc_feature (2129)..(2130): Xaa can be any naturally occurring amino acid
  misc_feature (2134)..(2135): Xaa can be any naturally occurring amino acid
  misc_feature (2138)..(2139): Xaa can be any naturally occurring amino acid
  misc_feature (2141)..(2141): Xaa can be any naturally occurring amino acid
  misc_feature (2146)..(2147): Xaa can be any naturally occurring amino acid
  misc_feature (2150)..(2150): Xaa can be any naturally occurring amino acid
  misc_feature (2153)..(2153): Xaa can be any naturally occurring amino acid
  misc_feature (2155)..(2156): Xaa can be any naturally occurring amino acid
  misc_feature (2158)..(2158): Xaa can be any naturally occurring amino acid
  misc_feature (2165)..(2169): Xaa can be any naturally occurring amino acid
  misc_feature (2171)..(2179): Xaa can be any naturally occurring amino acid
  misc_feature (2181)..(2186): Xaa can be any naturally occurring amino acid
  misc_feature (2188)..(2189): Xaa can be any naturally occurring amino acid
  misc_feature (2192)..(2202): Xaa can be any naturally occurring amino acid
  misc_feature (2204)..(2206): Xaa can be any naturally occurring amino acid
  misc_feature (2209)..(2209): Xaa can be any naturally occurring amino acid
  misc_feature (2212)..(2213): Xaa can be any naturally occurring amino acid
  misc_feature (2219)..(2220): Xaa can be any naturally occurring amino acid
  misc_feature (2222)..(2223): Xaa can be any naturally occurring amino acid
  misc_feature (2226)..(2227): Xaa can be any naturally occurring amino acid
  misc_feature (2230)..(2230): Xaa can be any naturally occurring amino acid
  misc_feature (2232)..(2233): Xaa can be any naturally occurring amino acid
  misc_feature (2235)..(2244): Xaa can be any naturally occurring amino acid
  misc_feature (2246)..(2247): Xaa can be any naturally occurring amino acid
  misc_feature (2249)..(2251): Xaa can be any naturally occurring amino acid
  misc_feature (2253)..(2254): Xaa can be any naturally occurring amino acid
  misc_feature (2257)..(2271): Xaa can be any naturally occurring amino acid
  misc_feature (2273)..(2341): Xaa can be any naturally occurring amino acid
XXXXXXXXXXXXXXXXXXXXXXXXXXXXXXXXXXXXXXXXXXXXXXXXXXXXXXXXXXXXXXXXXXXXXXXXXXXXXXXXXXXXXXXXXXXXXXXXXXXXXXXXXXXXXXXXXXXXXXXXXXXXXXXXXXXXXXXXXXXXXXXXXXXXXXXXXXXXXXXXXXXXXXXXXXXXXXXXXXXXXXXXXXXXXXXXXXXXXXXXXXXXXXXXXXXXXXXXXXXXXXXXXXXXXXXXXXXXXXXXXXXXXXXXXXXXXXXXXXXXXXXXXXXXXXXXXXXXXXXXXXXXXXXXXXXXXXXXXXXXXXXXXXXXXXXXXXXXXXXXXXXXXXXXXXXXXXXXXXXXXXXXXXXXXXXXXXXXXXXXXXXXXXXXXXXXXXXXXXXXXXXXXXXXXXXXXXXXXXXXXXXXXXXXXXXXXXXXXXXXXXXXXXXXXXXXXXXXXXXXXXXXXXXXXXXXXXXXXXXXXXXXXXXXXXXXXXXXXXXXXXXXXXXXXXXXXXXXXXXXXXXXXXXXXXXXXXXXXXXXXXXXXXXXXXXXXXXXXXXXXXXXXXXXXXXXXXXXXXXXXXXXXXXXXXXXXXXXXXXXXXXXXXXXXXXXXXXXXXXXXXXXXXXXXXXXXXXXXXXXXXXXXXXXXXXXXXXXXXXXXXXXXXXXXXXXXXXXXXXXXXXXXXXXXXXXXXXXXXXXXXXXXXXXXXXXXXXXXXXXXXXXXXXXXXXXXXXXXXXXXXXXXXXXXXXXXXXXXXXXXXXXXXXXXXXXXXXXXXXXXXXXXXXXXXXXXXXXXXXXXXXXXXXXXXXXXXXXXXXXXXXXXXXXXXXXXXXXXXXXXXXXXXXXXXXXXXXXXXXXXXXXXXXXXXXXXXXXXXXXXXXXXXXXXXXXXXXXXXXXXXXXXXXXXXXXXXXXXXXXXXXXXXXXXXXXXXXXXXXXXXXXXXXXXXXXXXXXXXXXXXXXXXXXXXXXXXXXXXXXXXXXXXXXXXXXXXXXXXXXXXXXXXXXXXXXXXXXXXXXXXXXXXXXXXXXXXXXXXXXXXXXXXXXXXXXXXXXXXXXXXXXXXXXXXXXXXXXXXXXXXXXXXXXXXXXXXXXXXXXXXXXXXXXXXXXXXXXXXXXXXXXXXXXXXXXXXXXXXXXXXXXXXXXXXXXXXXXXXXXXXXXXXXXXXXXXXXXXXXXXXXXXXXXXXXXXXXXXXXXXXXXXXXXXXXXXXXXXXXXXXXXXXXXXXXXXXXXXXXXXXXXXXXXXXXXXXXXXXXXXXXXXXXXXXXXXXXXXXXXXXXXXXXXXXXXXXXXXXXXXXXXXXXXXXXXXXXXXXXXXXXXXXXXXXXXXXXXXXXXXXXXXXXXXXXXXXXXXXXXXXXXXXXXXXXXXXXXXXXXXXXXXXXXXXXXXXXXXXXXXXXXXXXXXXXXXXXXXXXXXXXXXXXXXXXXXXXXXXXXXXXXXXXXXXXXXXXXXXXXXXXXXXXXXXXXXXXXXXXXXXXXXXXXXXXXXXXXXXXXXXXXXXXXXXXXXXXXXXXXXXXXXXXXXXXXXXXXXXXXXXXXXXXXXXXXXXXXXXXXXXXXXXXXXXXXXXXXXXXXXXXXXXXXXXXXXXXXXXXXXXXXXXXXXXXXXXXXXXXXXXXXXXXXXXXXXXXXXXXXXXXXXXXXXXXXXXXXXXXXXXXXXXXXXXXXXXXXXXXXXXXXXXXXXXXXXXXXXXXXXXXXXXXXXXXXXXXXXXXXXXXXXXXXXXXXXXXXXXXXXXXXXXXXXXXXXXXXXXXXXXXXXXXXXXXXXXXXXXXXXXXXXXXXXXXXXXXXXXXXXXXXXXXXXXXXXXXXXXXXXXXXXXXXXXXXXXXXXXXXXXXXXXXXXXXXXXXXXXXXXXXXXXXXXXXXXXXXXXXXXXXXXXXXXXXXXXXXXXXXXXXXXXXXXXXXXXXXXXXXXXXXXXXXXXXXXXXXXXXXXXXXXXXXXXXXXXXXXXXXXXXXXXXXXXXXXXXXXXXXXXXXXXXXXXXXXXXXXXXXXXXXXXXXXXXXXXXXXXXXXXXXXXXXXXXXXXXXXXXXXXLXXXXWXXXIXXXLXXXXXXXXLXLWXXXXXXXLXXXXXDXHXWXXXXXXXXGXXXXXSXYXXXFXGXXXXFEPWKRXWKXWAXPXKCKXFXWLAXXNKCWTADRLXXRGLXXHPXXCXLCDQXXETXQHXLXXCXFARQFWXXXXXLXXXXXXXXXPXXXXXXFXXWWXXXXXXXXXXXKXXXKGXNSXXILGAWXXWXXRNXXVFXGXXPXXXXXXXXXXFXXEXXXWXXAGXXXXXXXXXXXXXXXLXXXXXXXXXXXXXXXXXXXXXXXXXXXXXXXXXXXXXXXXXXXXXXXXXXXXXXXXXXXXXXXXXXXXX

SEQ ID NO: 30393 - protein, 83 aa, artificial
  consensus
  misc_feature (4)..(4): Xaa can be any naturally occurring amino acid
  misc_feature (11)..(11): Xaa can be any naturally occurring amino acid
  misc_feature (15)..(15): Xaa can be any naturally occurring amino acid
  misc_feature (18)..(20): Xaa can be any naturally occurring amino acid
  misc_feature (23)..(23): Xaa can be any naturally occurring amino acid
  misc_feature (32)..(33): Xaa can be any naturally occurring amino acid
  misc_feature (35)..(35): Xaa can be any naturally occurring amino acid
  misc_feature (37)..(40): Xaa can be any naturally occurring amino acid
  misc_feature (43)..(43): Xaa can be any naturally occurring amino acid
  misc_feature (47)..(48): Xaa can be any naturally occurring amino acid
  misc_feature (50)..(51): Xaa can be any naturally occurring amino acid
  misc_feature (53)..(53): Xaa can be any naturally occurring amino acid
  misc_feature (55)..(55): Xaa can be any naturally occurring amino acid
  misc_feature (58)..(61): Xaa can be any naturally occurring amino acid
  misc_feature (63)..(63): Xaa can be any naturally occurring amino acid
  misc_feature (66)..(66): Xaa can be any naturally occurring amino acid
MASXKLWVCLXLLLXLEXXXVHXCRPLVAEEXXSXSXXXXKIXRELXXRXXEXKXRSXXXXTXLGXTLDSKRLSPGGPDPRHH

SEQ ID NO: 30394 - protein, 83 aa, artificial; identical to SEQ ID NO: 30393
  consensus
  misc_feature (4)..(4): Xaa can be any naturally occurring amino acid
  misc_feature (11)..(11): Xaa can be any naturally occurring amino acid
  misc_feature (15)..(15): Xaa can be any naturally occurring amino acid
  misc_feature (18)..(20): Xaa can be any naturally occurring amino acid
  misc_feature (23)..(23): Xaa can be any naturally occurring amino acid
  misc_feature (32)..(33): Xaa can be any naturally occurring amino acid
  misc_feature (35)..(35): Xaa can be any naturally occurring amino acid
  misc_feature (37)..(40): Xaa can be any naturally occurring amino acid
  misc_feature (43)..(43): Xaa can be any naturally occurring amino acid
  misc_feature (47)..(48): Xaa can be any naturally occurring amino acid
  misc_feature (50)..(51): Xaa can be any naturally occurring amino acid
  misc_feature (53)..(53): Xaa can be any naturally occurring amino acid
  misc_feature (55)..(55): Xaa can be any naturally occurring amino acid
  misc_feature (58)..(61): Xaa can be any naturally occurring amino acid
  misc_feature (63)..(63): Xaa can be any naturally occurring amino acid
  misc_feature (66)..(66): Xaa can be any naturally occurring amino acid

SEQ ID NO: 30395 - protein, 131 aa, artificial
  consensus
  misc_feature (1)..(50): Xaa can be any naturally occurring amino acid
  misc_feature (99)..(105): Xaa can be any naturally occurring amino acid
  misc_feature (107)..(114): Xaa can be any naturally occurring amino acid
  misc_feature (116)..(116): Xaa can be any naturally occurring amino acid
  misc_feature (118)..(119): Xaa can be any naturally occurring amino acid
  misc_feature (121)..(124): Xaa can be any naturally occurring amino acid
  misc_feature (126)..(126): Xaa can be any naturally occurring amino acid
  misc_feature (128)..(131): Xaa can be any naturally occurring amino acid
XXXXXXXXXXXXXXXXXXXXXXXXXXXXXXXXXXXXXXXXXXXXXXXXXXMAIGNDRVTGVGEWFRDRQLFVGAALAKCRLSIVAIAGWMGSLWSALLXXXXXXXCXXXXXXXXVXGXXRXXXXAXTXXXX

SEQ ID NO: 30396 - protein, 672 aa, artificial
  consensus
  misc_feature (1)..(89): Xaa can be any naturally occurring amino acid
  misc_feature (92)..(92): Xaa can be any naturally occurring amino acid
  misc_feature (95)..(95): Xaa can be any naturally occurring amino acid
  misc_feature (97)..(102): Xaa can be any naturally occurring amino acid
  misc_feature (105)..(106): Xaa can be any naturally occurring amino acid
  misc_feature (108)..(109): Xaa can be any naturally occurring amino acid
  misc_feature (111)..(111): Xaa can be any naturally occurring amino acid
  misc_feature (114)..(118): Xaa can be any naturally occurring amino acid
  misc_feature (120)..(121): Xaa can be any naturally occurring amino acid
  misc_feature (123)..(128): Xaa can be any naturally occurring amino acid
  misc_feature (132)..(132): Xaa can be any naturally occurring amino acid
  misc_feature (134)..(134): Xaa can be any naturally occurring amino acid
  misc_feature (136)..(136): Xaa can be any naturally occurring amino acid
  misc_feature (141)..(142): Xaa can be any naturally occurring amino acid
  misc_feature (144)..(147): Xaa can be any naturally occurring amino acid
  misc_feature (149)..(149): Xaa can be any naturally occurring amino acid
  misc_feature (151)..(153): Xaa can be any naturally occurring amino acid
  misc_feature (156)..(158): Xaa can be any naturally occurring amino acid
  misc_feature (161)..(162): Xaa can be any naturally occurring amino acid
  misc_feature (166)..(168): Xaa can be any naturally occurring amino acid
  misc_feature (170)..(170): Xaa can be any naturally occurring amino acid
  misc_feature (172)..(176): Xaa can be any naturally occurring amino acid
  misc_feature (179)..(179): Xaa can be any naturally occurring amino acid
  misc_feature (183)..(185): Xaa can be any naturally occurring amino acid
  misc_feature (189)..(190): Xaa can be any naturally occurring amino acid
  misc_feature (192)..(194): Xaa can be any naturally occurring amino acid
  misc_feature (198)..(199): Xaa can be any naturally occurring amino acid
  misc_feature (202)..(202): Xaa can be any naturally occurring amino acid
  misc_feature (204)..(206): Xaa can be any naturally occurring amino acid
  misc_feature (208)..(213): Xaa can be any naturally occurring amino acid
  misc_feature (215)..(222): Xaa can be any naturally occurring amino acid
  misc_feature (224)..(224): Xaa can be any naturally occurring amino acid
  misc_feature (226)..(237): Xaa can be any naturally occurring amino acid
  misc_feature (239)..(240): Xaa can be any naturally occurring amino acid
  misc_feature (242)..(250): Xaa can be any naturally occurring amino acid
  misc_feature (252)..(259): Xaa can be any naturally occurring amino acid
  misc_feature (261)..(261): Xaa can be any naturally occurring amino acid
  misc_feature (263)..(271): Xaa can be any naturally occurring amino acid
  misc_feature (273)..(284): Xaa can be any naturally occurring amino acid
  misc_feature (286)..(291): Xaa can be any naturally occurring amino acid
  misc_feature (293)..(295): Xaa can be any naturally occurring amino acid
  misc_feature (298)..(298): Xaa can be any naturally occurring amino acid
  misc_feature (300)..(308): Xaa can be any naturally occurring amino acid
  misc_feature (310)..(312): Xaa can be any naturally occurring amino acid
  misc_feature (314)..(317): Xaa can be any naturally occurring amino acid
  misc_feature (319)..(321): Xaa can be any naturally occurring amino acid
  misc_feature (324)..(325): Xaa can be any naturally occurring amino acid
  misc_feature (327)..(330): Xaa can be any naturally occurring amino acid
  misc_feature (332)..(333): Xaa can be any naturally occurring amino acid
  misc_feature (336)..(337): Xaa can be any naturally occurring amino acid
  misc_feature (339)..(354): Xaa can be any naturally occurring amino acid
  misc_feature (356)..(358): Xaa can be any naturally occurring amino acid
  misc_feature (360)..(360): Xaa can be any naturally occurring amino acid
  misc_feature (363)..(363): Xaa can be any naturally occurring amino acid
  misc_feature (366)..(367): Xaa can be any naturally occurring amino acid
  misc_feature (369)..(371): Xaa can be any naturally occurring amino acid
  misc_feature (374)..(375): Xaa can be any naturally occurring amino acid
  misc_feature (378)..(379): Xaa can be any naturally occurring amino acid
  misc_feature (381)..(383): Xaa can be any naturally occurring amino acid
  misc_feature (385)..(398): Xaa can be any naturally occurring amino acid
  misc_feature (400)..(401): Xaa can be any naturally occurring amino acid
  misc_feature (403)..(404): Xaa can be any naturally occurring amino acid
  misc_feature (406)..(406): Xaa can be any naturally occurring amino acid
  misc_feature (408)..(418): Xaa can be any naturally occurring amino acid
  misc_feature (420)..(421): Xaa can be any naturally occurring amino acid
  misc_feature (423)..(424): Xaa can be any naturally occurring amino acid
  misc_feature (426)..(429): Xaa can be any naturally occurring amino acid
  misc_feature (431)..(431): Xaa can be any naturally occurring amino acid
  misc_feature (433)..(433): Xaa can be any naturally occurring amino acid
  misc_feature (436)..(436): Xaa can be any naturally occurring amino acid
  misc_feature (438)..(438): Xaa can be any naturally occurring amino acid
  misc_feature (440)..(440): Xaa can be any naturally occurring amino acid
  misc_feature (443)..(444): Xaa can be any naturally occurring amino acid
  misc_feature (448)..(449): Xaa can be any naturally occurring amino acid
  misc_feature (453)..(453): Xaa can be any naturally occurring amino acid
  misc_feature (455)..(456): Xaa can be any naturally occurring amino acid
  misc_feature (458)..(461): Xaa can be any naturally occurring amino acid
  misc_feature (465)..(470): Xaa can be any naturally occurring amino acid
  misc_feature (472)..(472): Xaa can be any naturally occurring amino acid
  misc_feature (475)..(475): Xaa can be any naturally occurring amino acid
  misc_feature (477)..(477): Xaa can be any naturally occurring amino acid
  misc_feature (482)..(482): Xaa can be any naturally occurring amino acid
  misc_feature (485)..(485): Xaa can be any naturally occurring amino acid
  misc_feature (488)..(489): Xaa can be any naturally occurring amino acid
  misc_feature (491)..(495): Xaa can be any naturally occurring amino acid
  misc_feature (499)..(500): Xaa can be any naturally occurring amino acid
  misc_feature (503)..(506): Xaa can be any naturally occurring amino acid
  misc_feature (508)..(509): Xaa can be any naturally occurring amino acid
  misc_feature (511)..(512): Xaa can be any naturally occurring amino acid
  misc_feature (515)..(516): Xaa can be any naturally occurring amino acid
  misc_feature (518)..(518): Xaa can be any naturally occurring amino acid
  misc_feature (523)..(524): Xaa can be any naturally occurring amino acid
  misc_feature (527)..(528): Xaa can be any naturally occurring amino acid
  misc_feature (530)..(532): Xaa can be any naturally occurring amino acid
  misc_feature (537)..(537): Xaa can be any naturally occurring amino acid
  misc_feature (540)..(541): Xaa can be any naturally occurring amino acid
  misc_feature (545)..(546): Xaa can be any naturally occurring amino acid
  misc_feature (549)..(551): Xaa can be any naturally occurring amino acid
  misc_feature (553)..(553): Xaa can be any naturally occurring amino acid
  misc_feature (555)..(555): Xaa can be any naturally occurring amino acid
  misc_feature (557)..(557): Xaa can be any naturally occurring amino acid
  misc_feature (560)..(560): Xaa can be any naturally occurring amino acid
  misc_feature (562)..(587): Xaa can be any naturally occurring amino acid
  misc_feature (589)..(672): Xaa can be any naturally occurring amino acid
XXXXXXXXXXXXXXXXXXXXXXXXXXXXXXXXXXXXXXXXXXXXXXXXXXXXXXXXXXXXXXXXXXXXXXXXXXXXXXXXXXXXXXXXXPGXYGXPXXXXXXDRXXDXXYXQGXXXXXFXXRXXXXXXSTVXRXNXPPGPXXFXXXXPXVXXXLDXXXSFXXLFDXXXVXKXXXXXGTXMPSXXXTGGXXRXXXYLDXXEPXHXXXKXXXXXXLXXXXXXXXPXFXXXXXXXXXXXXEXXLXXXXXXXXXFXXXXXXXXFXFXXXXXXXXXPXXXXXXXXXXXXPXXXXXXWXXXQLXPXXXXXXXXXPXXXEXXXXHXXXLPXXLXXXXYXXLYXXFXXXXXXXXXXXXXXXXGXXXRXEAXHNXXFXXXFNXXGGXXKXXXPXXXXXXXXXXXXXXHXXLXXEXRXXXXXXXXXXXGXXTXXAXXXXMXLXKSXVXEXLRXXPPVXXQYGXAXXDXXXXSHDXXXXXXKXGEXLXGYQPXATXDPXXFXXXXXEFVXXRFXXXXGXXGXXLLXXVXWSNGXXETXXPXXXNKQCXGKXXVVLXXRLXXXEXFXRXYDXFXXXXXXXXXXXXXXXXXXXXXXXXXXAXXXXXXXXXXXXXXXXXXXXXXXXXXXXXXXXXXXXXXXXXXXXXXXXXXXXXXXXXXXXXXXXXXXXXXXXXXXXXXXXXXXX

SEQ ID NO: 30397 - protein, 672 aa, artificial; identical to SEQ ID NO: 30396
  consensus
  misc_feature (1)..(89): Xaa can be any naturally occurring amino acid
  misc_feature (92)..(92): Xaa can be any naturally occurring amino acid
  misc_feature (95)..(95): Xaa can be any naturally occurring amino acid
  misc_feature (97)..(102): Xaa can be any naturally occurring amino acid
  misc_feature (105)..(106): Xaa can be any naturally occurring amino acid
  misc_feature (108)..(109): Xaa can be any naturally occurring amino acid
  misc_feature (111)..(111): Xaa can be any naturally occurring amino acid
  misc_feature (114)..(118): Xaa can be any naturally occurring amino acid
  misc_feature (120)..(121): Xaa can be any naturally occurring amino acid
  misc_feature (123)..(128): Xaa can be any naturally occurring amino acid
  misc_feature (132)..(132): Xaa can be any naturally occurring amino acid
  misc_feature (134)..(134): Xaa can be any naturally occurring amino acid
  misc_feature (136)..(136): Xaa can be any naturally occurring amino acid
  misc_feature (141)..(142): Xaa can be any naturally occurring amino acid
  misc_feature (144)..(147): Xaa can be any naturally occurring amino acid
  misc_feature (149)..(149): Xaa can be any naturally occurring amino acid
  misc_feature (151)..(153): Xaa can be any naturally occurring amino acid
  misc_feature (156)..(158): Xaa can be any naturally occurring amino acid
  misc_feature (161)..(162): Xaa can be any naturally occurring amino acid
  misc_feature (166)..(168): Xaa can be any naturally occurring amino acid
  misc_feature (170)..(170): Xaa can be any naturally occurring amino acid
  misc_feature (172)..(176): Xaa can be any naturally occurring amino acid
  misc_feature (179)..(179): Xaa can be any naturally occurring amino acid
  misc_feature (183)..(185): Xaa can be any naturally occurring amino acid
  misc_feature (189)..(190): Xaa can be any naturally occurring amino acid
  misc_feature (192)..(194): Xaa can be any naturally occurring amino acid
  misc_feature (198)..(199): Xaa can be any naturally occurring amino acid
  misc_feature (202)..(202): Xaa can be any naturally occurring amino acid
  misc_feature (204)..(206): Xaa can be any naturally occurring amino acid
  misc_feature (208)..(213): Xaa can be any naturally occurring amino acid
  misc_feature (215)..(222): Xaa can be any naturally occurring amino acid
  misc_feature (224)..(224): Xaa can be any naturally occurring amino acid
  misc_feature (226)..(237): Xaa can be any naturally occurring amino acid
  misc_feature (239)..(240): Xaa can be any naturally occurring amino acid
  misc_feature (242)..(250): Xaa can be any naturally occurring amino acid
  misc_feature (252)..(259): Xaa can be any naturally occurring amino acid
  misc_feature (261)..(261): Xaa can be any naturally occurring amino acid
  misc_feature (263)..(271): Xaa can be any naturally occurring amino acid
  misc_feature (273)..(284): Xaa can be any naturally occurring amino acid
  misc_feature (286)..(291): Xaa can be any naturally occurring amino acid
  misc_feature (293)..(295): Xaa can be any naturally occurring amino acid
  misc_feature (298)..(298): Xaa can be any naturally occurring amino acid
  misc_feature (300)..(308): Xaa can be any naturally occurring amino acid
  misc_feature (310)..(312): Xaa can be any naturally occurring amino acid
  misc_feature (314)..(317): Xaa can be any naturally occurring amino acid
  misc_feature (319)..(321): Xaa can be any naturally occurring amino acid
  misc_feature (324)..(325): Xaa can be any naturally occurring amino acid
  misc_feature (327)..(330): Xaa can be any naturally occurring amino acid
  misc_feature (332)..(333): Xaa can be any naturally occurring amino acid
  misc_feature (336)..(337): Xaa can be any naturally occurring amino acid
  misc_feature (339)..(354): Xaa can be any naturally occurring amino acid
  misc_feature (356)..(358): Xaa can be any naturally occurring amino acid
  misc_feature (360)..(360): Xaa can be any naturally occurring amino acid
  misc_feature (363)..(363): Xaa can be any naturally occurring amino acid
  misc_feature (366)..(367): Xaa can be any naturally occurring amino acid
  misc_feature (369)..(371): Xaa can be any naturally occurring amino acid
  misc_feature (374)..(375): Xaa can be any naturally occurring amino acid
  misc_feature (378)..(379): Xaa can be any naturally occurring amino acid
  misc_feature (381)..(383): Xaa can be any naturally occurring amino acid
  misc_feature (385)..(398): Xaa can be any naturally occurring amino acid
  misc_feature (400)..(401): Xaa can be any naturally occurring amino acid
  misc_feature (403)..(404): Xaa can be any naturally occurring amino acid
  misc_feature (406)..(406): Xaa can be any naturally occurring amino acid
  misc_feature (408)..(418): Xaa can be any naturally occurring amino acid
  misc_feature (420)..(421): Xaa can be any naturally occurring amino acid
  misc_feature (423)..(424): Xaa can be any naturally occurring amino acid
  misc_feature (426)..(429): Xaa can be any naturally occurring amino acid
  misc_feature (431)..(431): Xaa can be any naturally occurring amino acid
  misc_feature (433)..(433): Xaa can be any naturally occurring amino acid
  misc_feature (436)..(436): Xaa can be any naturally occurring amino acid
  misc_feature (438)..(438): Xaa can be any naturally occurring amino acid
  misc_feature (440)..(440): Xaa can be any naturally occurring amino acid
  misc_feature (443)..(444): Xaa can be any naturally occurring amino acid
  misc_feature (448)..(449): Xaa can be any naturally occurring amino acid
  misc_feature (453)..(453): Xaa can be any naturally occurring amino acid
  misc_feature (455)..(456): Xaa can be any naturally occurring amino acid
  misc_feature (458)..(461): Xaa can be any naturally occurring amino acid
  misc_feature (465)..(470): Xaa can be any naturally occurring amino acid
  misc_feature (472)..(472): Xaa can be any naturally occurring amino acid
  misc_feature (475)..(475): Xaa can be any naturally occurring amino acid
  misc_feature (477)..(477): Xaa can be any naturally occurring amino acid
  misc_feature (482)..(482): Xaa can be any naturally occurring amino acid
  misc_feature (485)..(485): Xaa can be any naturally occurring amino acid
  misc_feature (488)..(489): Xaa can be any naturally occurring amino acid
  misc_feature (491)..(495): Xaa can be any naturally occurring amino acid
  misc_feature (499)..(500): Xaa can be any naturally occurring amino acid
  misc_feature (503)..(506): Xaa can be any naturally occurring amino acid
  misc_feature (508)..(509): Xaa can be any naturally occurring amino acid
  misc_feature (511)..(512): Xaa can be any naturally occurring amino acid
  misc_feature (515)..(516): Xaa can be any naturally occurring amino acid
  misc_feature (518)..(518): Xaa can be any naturally occurring amino acid
  misc_feature (523)..(524): Xaa can be any naturally occurring amino acid
  misc_feature (527)..(528): Xaa can be any naturally occurring amino acid
  misc_feature (530)..(532): Xaa can be any naturally occurring amino acid
  misc_feature (537)..(537): Xaa can be any naturally occurring amino acid
  misc_feature (540)..(541): Xaa can be any naturally occurring amino acid
  misc_feature (545)..(546): Xaa can be any naturally occurring amino acid
  misc_feature (549)..(551): Xaa can be any naturally occurring amino acid
  misc_feature (553)..(553): Xaa can be any naturally occurring amino acid
  misc_feature (555)..(555): Xaa can be any naturally occurring amino acid
  misc_feature (557)..(557): Xaa can be any naturally occurring amino acid
  misc_feature (560)..(560): Xaa can be any naturally occurring amino acid
  misc_feature (562)..(587): Xaa can be any naturally occurring amino acid
  misc_feature (589)..(672): Xaa can be any naturally occurring amino acid

SEQ ID NO: 30398 - protein, 161 aa, artificial
  consensus
  misc_feature (2)..(3): Xaa can be any naturally occurring amino acid
  misc_feature (5)..(28): Xaa can be any naturally occurring amino acid
  misc_feature (30)..(30): Xaa can be any naturally occurring amino acid
  misc_feature (34)..(34): Xaa can be any naturally occurring amino acid
  misc_feature (43)..(43): Xaa can be any naturally occurring amino acid
  misc_feature (45)..(50): Xaa can be any naturally occurring amino acid
  misc_feature (53)..(53): Xaa can be any naturally occurring amino acid
  misc_feature (60)..(60): Xaa can be any naturally occurring amino acid
  misc_feature (62)..(62): Xaa can be any naturally occurring amino acid
  misc_feature (65)..(65): Xaa can be any naturally occurring amino acid
  misc_feature (68)..(68): Xaa can be any naturally occurring amino acid
  misc_feature (71)..(71): Xaa can be any naturally occurring amino acid
  misc_feature (73)..(76): Xaa can be any naturally occurring amino acid
  misc_feature (78)..(79): Xaa can be any naturally occurring amino acid
  misc_feature (81)..(84): Xaa can be any naturally occurring amino acid
  misc_feature (91)..(92): Xaa can be any naturally occurring amino acid
  misc_feature (95)..(95): Xaa can be any naturally occurring amino acid
  misc_feature (97)..(97): Xaa can be any naturally occurring amino acid
  misc_feature (99)..(99): Xaa can be any naturally occurring amino acid
  misc_feature (102)..(103): Xaa can be any naturally occurring amino acid
  misc_feature (106)..(106): Xaa can be any naturally occurring amino acid
  misc_feature (113)..(113): Xaa can be any naturally occurring amino acid
  misc_feature (120)..(121): Xaa can be any naturally occurring amino acid
  misc_feature (123)..(123): Xaa can be any naturally occurring amino acid
  misc_feature (126)..(126): Xaa can be any naturally occurring amino acid
  misc_feature (128)..(129): Xaa can be any naturally occurring amino acid
  misc_feature (132)..(137): Xaa can be any naturally occurring amino acid
  misc_feature (139)..(139): Xaa can be any naturally occurring amino acid
  misc_feature (141)..(142): Xaa can be any naturally occurring amino acid
  misc_feature (144)..(149): Xaa can be any naturally occurring amino acid
  misc_feature (151)..(161): Xaa can be any naturally occurring amino acid
MXXPXXXXXXXXXXXXXXXXXXXXXXXXKXPTPXELISHYESXGXXXXXXASXKVIEDLXQXALXRVXSSXKXXXXKXXLXXXXRKIDAIXXRLXVXDXKLXXKPXYVETFAXGLASGAXXLXGIXAXXPHXXXXXXQXWXXVXXXXXXSXXXXXXXXXXX

SEQ ID NO: 30399 - protein, 161 aa, artificial; identical to SEQ ID NO: 30398
  consensus
  misc_feature (2)..(3): Xaa can be any naturally occurring amino acid
  misc_feature (5)..(28): Xaa can be any naturally occurring amino acid
  misc_feature (30)..(30): Xaa can be any naturally occurring amino acid
  misc_feature (34)..(34): Xaa can be any naturally occurring amino acid
  misc_feature (43)..(43): Xaa can be any naturally occurring amino acid
  misc_feature (45)..(50): Xaa can be any naturally occurring amino acid
  misc_feature (53)..(53): Xaa can be any naturally occurring amino acid
  misc_feature (60)..(60): Xaa can be any naturally occurring amino acid
  misc_feature (62)..(62): Xaa can be any naturally occurring amino acid
  misc_feature (65)..(65): Xaa can be any naturally occurring amino acid
  misc_feature (68)..(68): Xaa can be any naturally occurring amino acid
  misc_feature (71)..(71): Xaa can be any naturally occurring amino acid
  misc_feature (73)..(76): Xaa can be any naturally occurring amino acid
  misc_feature (78)..(79): Xaa can be any naturally occurring amino acid
  misc_feature (81)..(84): Xaa can be any naturally occurring amino acid
  misc_feature (91)..(92): Xaa can be any naturally occurring amino acid
  misc_feature (95)..(95): Xaa can be any naturally occurring amino acid
  misc_feature (97)..(97): Xaa can be any naturally occurring amino acid
  misc_feature (99)..(99): Xaa can be any naturally occurring amino acid
  misc_feature (102)..(103): Xaa can be any naturally occurring amino acid
  misc_feature (106)..(106): Xaa can be any naturally occurring amino acid
  misc_feature (113)..(113): Xaa can be any naturally occurring amino acid
  misc_feature (120)..(121): Xaa can be any naturally occurring amino acid
  misc_feature (123)..(123): Xaa can be any naturally occurring amino acid
  misc_feature (126)..(126): Xaa can be any naturally occurring amino acid
  misc_feature (128)..(129): Xaa can be any naturally occurring amino acid
  misc_feature (132)..(137): Xaa can be any naturally occurring amino acid
  misc_feature (139)..(139): Xaa can be any naturally occurring amino acid
  misc_feature (141)..(142): Xaa can be any naturally occurring amino acid
  misc_feature (144)..(149): Xaa can be any naturally occurring amino acid
  misc_feature (151)..(161): Xaa can be any naturally occurring amino acid

SEQ ID NO: 30400 - protein, 206 aa, artificial
  consensus
  misc_feature (1)..(31): Xaa can be any naturally occurring amino acid
  misc_feature (35)..(36): Xaa can be any naturally occurring amino acid
  misc_feature (38)..(38): Xaa can be any naturally occurring amino acid
  misc_feature (40)..(48): Xaa can be any naturally occurring amino acid
  misc_feature (51)..(58): Xaa can be any naturally occurring amino acid
  misc_feature (62)..(63): Xaa can be any naturally occurring amino acid
  misc_feature (75)..(75): Xaa can be any naturally occurring amino acid
  misc_feature (99)..(99): Xaa can be any naturally occurring amino acid
  misc_feature (108)..(108): Xaa can be any naturally occurring amino acid
  misc_feature (111)..(112): Xaa can be any naturally occurring amino acid
  misc_feature (114)..(114): Xaa can be any naturally occurring amino acid
  misc_feature (118)..(118): Xaa can be any naturally occurring amino acid
  misc_feature (120)..(120): Xaa can be any naturally occurring amino acid
  misc_feature (132)..(132): Xaa can be any naturally occurring amino acid
  misc_feature (137)..(137): Xaa can be any naturally occurring amino acid
  misc_feature (140)..(142): Xaa can be any naturally occurring amino acid
  misc_feature (145)..(145): Xaa can be any naturally occurring amino acid
  misc_feature (147)..(147): Xaa can be any naturally occurring amino acid
  misc_feature (149)..(149): Xaa can be any naturally occurring amino acid
  misc_feature (152)..(152): Xaa can be any naturally occurring amino acid
  misc_feature (160)..(160): Xaa can be any naturally occurring amino acid
  misc_feature (162)..(184): Xaa can be any naturally occurring amino acid
  misc_feature (186)..(187): Xaa can be any naturally occurring amino acid
  misc_feature (189)..(193): Xaa can be any naturally occurring amino acid
  misc_feature (196)..(206): Xaa can be any naturally occurring amino acid
XXXXXXXXXXXXXXXXXXXXXXXXXXXXXXXMQFXXGXGXXXXXXXXXGGXXXXXXXXAWEXXRRHFSRKRAVDXRRINPKVPKEEAVAISGRLLQILXDHGPLTVGXTWXXAXKDAXIXGLNSKTHMKILXLKWMXGRXXXKLXCXQXGNXKKFLYSPXTXXXXXXXXXXXXXXXXXXXXXXXGXXPXXXXXKQXXXXXXXXXXX

SEQ ID NO: 30401 - protein, 268 aa, artificial
  consensus
  misc_feature (1)..(84): Xaa can be any naturally occurring amino acid
  misc_feature (87)..(107): Xaa can be any naturally occurring amino acid
  misc_feature (109)..(109): Xaa can be any naturally occurring amino acid
  misc_feature (111)..(111): Xaa can be any naturally occurring amino acid
  misc_feature (116)..(117): Xaa can be any naturally occurring amino acid
  misc_feature (119)..(121): Xaa can be any naturally occurring amino acid
  misc_feature (123)..(133): Xaa can be any naturally occurring amino acid
  misc_feature (135)..(135): Xaa can be any naturally occurring amino acid
  misc_feature (137)..(141): Xaa can be any naturally occurring amino acid
  misc_feature (143)..(156): Xaa can be any naturally occurring amino acid
  misc_feature (159)..(159): Xaa can be any naturally occurring amino acid
  misc_feature (162)..(163): Xaa can be any naturally occurring amino acid
  misc_feature (165)..(165): Xaa can be any naturally occurring amino acid
  misc_feature (168)..(168): Xaa can be any naturally occurring amino acid
  misc_feature (170)..(171): Xaa can be any naturally occurring amino acid
  misc_feature (174)..(174): Xaa can be any naturally occurring amino acid
  misc_feature (180)..(181): Xaa can be any naturally occurring amino acid
  misc_feature (183)..(185): Xaa can be any naturally occurring amino acid
  misc_feature (188)..(190): Xaa can be any naturally occurring amino acid
  misc_feature (193)..(195): Xaa can be any naturally occurring amino acid
  misc_feature (198)..(199): Xaa can be any naturally occurring amino acid
  misc_feature (201)..(201): Xaa can be any naturally occurring amino acid
  misc_feature (204)..(206): Xaa can be any naturally occurring amino acid
  misc_feature (208)..(268): Xaa can be any naturally occurring amino acid
XXXXXXXXXXXXXXXXXXXXXXXXXXXXXXXXXXXXXXXXXXXXXXXXXXXXXXXXXXXXXXXXXXXXXXXXXXXXXXXXXXXXLPXXXXXXXXXXXXXXXXXXXXXGXRXRLSSXXSXXXQXXXXXXXXXXXFXRXXXXXSXXXXXXXXXXXXXXWWXWGXXWXLSXKXXFAXDLEMNXXEXXXLGXXXRGXXXHVXXKXRSXXXRXXXXXXXXXXXXXXXXXXXXXXXXXXXXXXXXXXXXXXXXXXXXXXXXXXXXXXXXXXXXX

SEQ ID NO: 30402 - protein, 349 aa, artificial
  consensus
  misc_feature (1)..(56): Xaa can be any naturally occurring amino acid
  misc_feature (59)..(60): Xaa can be any naturally occurring amino acid
  misc_feature (63)..(66): Xaa can be any naturally occurring amino acid
  misc_feature (72)..(74): Xaa can be any naturally occurring amino acid
  misc_feature (76)..(76): Xaa can be any naturally occurring amino acid
  misc_feature (79)..(80): Xaa can be any naturally occurring amino acid
  misc_feature (82)..(88): Xaa can be any naturally occurring amino acid
  misc_feature (91)..(153): Xaa can be any naturally occurring amino acid
  misc_feature (155)..(155): Xaa can be any naturally occurring amino acid
  misc_feature (164)..(208): Xaa can be any naturally occurring amino acid
  misc_feature (210)..(221): Xaa can be any naturally occurring amino acid
  misc_feature (223)..(223): Xaa can be any naturally occurring amino acid
  misc_feature (225)..(259): Xaa can be any naturally occurring amino acid
  misc_feature (261)..(278): Xaa can be any naturally occurring amino acid
  misc_feature (280)..(280): Xaa can be any naturally occurring amino acid
  misc_feature (287)..(305): Xaa can be any naturally occurring amino acid
  misc_feature (308)..(310): Xaa can be any naturally occurring amino acid
  misc_feature (312)..(313): Xaa can be any naturally occurring amino acid
  misc_feature (316)..(317): Xaa can be any naturally occurring amino acid
  misc_feature (320)..(321): Xaa can be any naturally occurring amino acid
  misc_feature (323)..(349): Xaa can be any naturally occurring amino acid
XXXXXXXXXXXXXXXXXXXXXXXXXXXXXXXXXXXXXXXXXXXXXXXXXXXXXXXXLWXXVRXXXXMLRKGXXXKXKLXXDXXXXXXXGKXXXXXXXXXXXXXXXXXXXXXXXXXXXXXXXXXXXXXXXXXXXXXXXXXXXXXXXXXXXXXXXEXEFSCSNTPXXXXXXXXXXXXXXXXXXXXXXXXXXXXXXXXXXXXXXXXXXXXXDXXXXXXXXXXXXEXLXXXXXXXXXXXXXXXXXXXXXXXXXXXXXXXXXXXPXXXXXXXXXXXXXXXXXXRXTDSPFPXXXXXXXXXXXXXXXXXXXVDXXXAXXFIXXFYXXLXXXXXXXXXXXXXXXXXXXXXXXXXXX

SEQ ID NO: 30403 - protein, 1126 aa, artificial
  consensus
  misc_feature (1)..(457): Xaa can be any naturally occurring amino acid
  misc_feature (461)..(501): Xaa can be any naturally occurring amino acid
  misc_feature (503)..(525): Xaa can be any naturally occurring amino acid
  misc_feature (527)..(530): Xaa can be any naturally occurring amino acid
  misc_feature (533)..(572): Xaa can be any naturally occurring amino acid
  misc_feature (574)..(588): Xaa can be any naturally occurring amino acid
  misc_feature (590)..(590): Xaa can be any naturally occurring amino acid
  misc_feature (592)..(594): Xaa can be any naturally occurring amino acid
  misc_feature (596)..(596): Xaa can be any naturally occurring amino acid
  misc_feature (598)..(598): Xaa can be any naturally occurring amino acid
  misc_feature (600)..(606): Xaa can be any naturally occurring amino acid
  misc_feature (608)..(610): Xaa can be any naturally occurring amino acid
  misc_feature (612)..(619): Xaa can be any naturally occurring amino acid
  misc_feature (621)..(621): Xaa can be any naturally occurring amino acid
  misc_feature (623)..(624): Xaa can be any naturally occurring amino acid
  misc_feature (630)..(633): Xaa can be any naturally occurring amino acid
  misc_feature (635)..(635): Xaa can be any naturally occurring amino acid
  misc_feature (637)..(640): Xaa can be any naturally occurring amino acid
  misc_feature (642)..(642): Xaa can be any naturally occurring amino acid
  misc_feature (644)..(644): Xaa can be any naturally occurring amino acid
  misc_feature (649)..(659): Xaa can be any naturally occurring amino acid
  misc_feature (662)..(662): Xaa can be any naturally occurring amino acid
  misc_feature (664)..(675): Xaa can be any naturally occurring amino acid
  misc_feature (678)..(678): Xaa can be any naturally occurring amino acid
  misc_feature (680)..(709): Xaa can be any naturally occurring amino acid
  misc_feature (711)..(711): Xaa can be any naturally occurring amino acid
  misc_feature (713)..(744): Xaa can be any naturally occurring amino acid
  misc_feature (747)..(747): Xaa can be any naturally occurring amino acid
  misc_feature (749)..(749): Xaa can be any naturally occurring amino acid
  misc_feature (751)..(751): Xaa can be any naturally occurring amino acid
  misc_feature (754)..(818): Xaa can be any naturally occurring amino acid
  misc_feature (820)..(1126): Xaa can be any naturally occurring amino acid
XXXXXXXXXXXXXXXXXXXXXXXXXXXXXXXXXXXXXXXXXXXXXXXXXXXXXXXXXXXXXXXXXXXXXXXXXXXXXXXXXXXXXXXXXXXXXXXXXXXXXXXXXXXXXXXXXXXXXXXXXXXXXXXXXXXXXXXXXXXXXXXXXXXXXXXXXXXXXXXXXXXXXXXXXXXXXXXXXXXXXXXXXXXXXXXXXXXXXXXXXXXXXXXXXXXXXXXXXXXXXXXXXXXXXXXXXXXXXXXXXXXXXXXXXXXXXXXXXXXXXXXXXXXXXXXXXXXXXXXXXXXXXXXXXXXXXXXXXXXXXXXXXXXXXXXXXXXXXXXXXXXXXXXXXXXXXXXXXXXXXXXXXXXXXXXXXXXXXXXXXXXXXXXXXXXXXXXXXXXXXXXXXXXXXXXXXXXXXXXXXXXXXXXXXXXXXXXXXXXXXXXXXXXXXXXXXXXXXXXXXXXXXXXXXXXXXXXXXPGDXXXXXXXXXXXXXXXXXXXXXXXXXXXXXXXXXXXXXXXXXGXXXXXXXXXXXXXXXXXXXXXXXIXXXXAGXXXXXXXXXXXXXXXXXXXXXXXXXXXXXXXXXXXXXXXXRXXXXXXXXXXXXXXXYXPXXXDXVXGXXXXXXXDXXXVXXXXXXXXAXLXXLAFEGXXXXNXPXXXXGXLXYARVXXXXXXXXXXXELXCXXXXXXXXXXXXFGXLXXXXXXXXXXXXXXXXXXXXXXXXXXXXXXRXLXXXXXXXXXXXXXXXXXXXXXXXXXXXXXXXXFEXAXGXNGXXXXXXXXXXXXXXXXXXXXXXXXXXXXXXXXXXXXXXXXXXXXXXXXXXXXXXXXXXXXXXXXXWXXXXXXXXXXXXXXXXXXXXXXXXXXXXXXXXXXXXXXXXXXXXXXXXXXXXXXXXXXXXXXXXXXXXXXXXXXXXXXXXXXXXXXXXXXXXXXXXXXXXXXXXXXXXXXXXXXXXXXXXXXXXXXXXXXXXXXXXXXXXXXXXXXXXXXXXXXXXXXXXXXXXXXXXXXXXXXXXXXXXXXXXXXXXXXXXXXXXXXXXXXXXXXXXXXXXXXXXXXXXXXXXXXXXXXXXXXXXXXXXXXXXXXXXXXXXXXXXXXXXXXXXXXXXXXXXXXXXXXXXXXXXXXXXXXXXXXXXXXXXXXXXXXX

SEQ ID NO: 30404 - protein, 1126 aa, artificial; identical to SEQ ID NO: 30403
  consensus
  misc_feature (1)..(457): Xaa can be any naturally occurring amino acid
  misc_feature (461)..(501): Xaa can be any naturally occurring amino acid
  misc_feature (503)..(525): Xaa can be any naturally occurring amino acid
  misc_feature (527)..(530): Xaa can be any naturally occurring amino acid
  misc_feature (533)..(572): Xaa can be any naturally occurring amino acid
  misc_feature (574)..(588): Xaa can be any naturally occurring amino acid
  misc_feature (590)..(590): Xaa can be any naturally occurring amino acid
  misc_feature (592)..(594): Xaa can be any naturally occurring amino acid
  misc_feature (596)..(596): Xaa can be any naturally occurring amino acid
  misc_feature (598)..(598): Xaa can be any naturally occurring amino acid
  misc_feature (600)..(606): Xaa can be any naturally occurring amino acid
  misc_feature (608)..(610): Xaa can be any naturally occurring amino acid
  misc_feature (612)..(619): Xaa can be any naturally occurring amino acid
  misc_feature (621)..(621): Xaa can be any naturally occurring amino acid
  misc_feature (623)..(624): Xaa can be any naturally occurring amino acid
  misc_feature (630)..(633): Xaa can be any naturally occurring amino acid
  misc_feature (635)..(635): Xaa can be any naturally occurring amino acid
  misc_feature (637)..(640): Xaa can be any naturally occurring amino acid
  misc_feature (642)..(642): Xaa can be any naturally occurring amino acid
  misc_feature (644)..(644): Xaa can be any naturally occurring amino acid
  misc_feature (649)..(659): Xaa can be any naturally occurring amino acid
  misc_feature (662)..(662): Xaa can be any naturally occurring amino acid
  misc_feature (664)..(675): Xaa can be any naturally occurring amino acid
  misc_feature (678)..(678): Xaa can be any naturally occurring amino acid
  misc_feature (680)..(709): Xaa can be any naturally occurring amino acid
  misc_feature (711)..(711): Xaa can be any naturally occurring amino acid
  misc_feature (713)..(744): Xaa can be any naturally occurring amino acid
  misc_feature (747)..(747): Xaa can be any naturally occurring amino acid
  misc_feature (749)..(749): Xaa can be any naturally occurring amino acid
  misc_feature (751)..(751): Xaa can be any naturally occurring amino acid
  misc_feature (754)..(818): Xaa can be any naturally occurring amino acid
  misc_feature (820)..(1126): Xaa can be any naturally occurring amino acid

SEQ ID NO: 30405 - protein, 650 aa, artificial
  consensus
  misc_feature (1)..(170): Xaa can be any naturally occurring amino acid
  misc_feature (172)..(174): Xaa can be any naturally occurring amino acid
  misc_feature (176)..(247): Xaa can be any naturally occurring amino acid
  misc_feature (249)..(256): Xaa can be any naturally occurring amino acid
  misc_feature (258)..(261): Xaa can be any naturally occurring amino acid
  misc_feature (263)..(271): Xaa can be any naturally occurring amino acid
  misc_feature (273)..(274): Xaa can be any naturally occurring amino acid
  misc_feature (276)..(279): Xaa can be any naturally occurring amino acid
  misc_feature (281)..(291): Xaa can be any naturally occurring amino acid
  misc_feature (293)..(294): Xaa can be any naturally occurring amino acid
  misc_feature (296)..(298): Xaa can be any naturally occurring amino acid
  misc_feature (300)..(301): Xaa can be any naturally occurring amino acid
  misc_feature (303)..(304): Xaa can be any naturally occurring amino acid
  misc_feature (306)..(306): Xaa can be any naturally occurring amino acid
  misc_feature (310)..(316): Xaa can be any naturally occurring amino acid
  misc_feature (318)..(318): Xaa can be any naturally occurring amino acid
  misc_feature (320)..(347): Xaa can be any naturally occurring amino acid
  misc_feature (349)..(350): Xaa can be any naturally occurring amino acid
  misc_feature (352)..(364): Xaa can be any naturally occurring amino acid
  misc_feature (367)..(368): Xaa can be any naturally occurring amino acid
  misc_feature (370)..(372): Xaa can be any naturally occurring amino acid
  misc_feature (376)..(385): Xaa can be any naturally occurring amino acid
  misc_feature (387)..(417): Xaa can be any naturally occurring amino acid
  misc_feature (420)..(421): Xaa can be any naturally occurring amino acid
  misc_feature (423)..(426): Xaa can be any naturally occurring amino acid
  misc_feature (428)..(431): Xaa can be any naturally occurring amino acid
  misc_feature (434)..(435): Xaa can be any naturally occurring amino acid
  misc_feature (438)..(443): Xaa can be any naturally occurring amino acid
  misc_feature (448)..(452): Xaa can be any naturally occurring amino acid
  misc_feature (455)..(456): Xaa can be any naturally occurring amino acid
  misc_feature (458)..(460): Xaa can be any naturally occurring amino acid
  misc_feature (463)..(465): Xaa can be any naturally occurring amino acid
  misc_feature (467)..(469): Xaa can be any naturally occurring amino acid
  misc_feature (471)..(472): Xaa can be any naturally occurring amino acid
  misc_feature (474)..(474): Xaa can be any naturally occurring amino acid
  misc_feature (477)..(477): Xaa can be any naturally occurring amino acid
  misc_feature (479)..(479): Xaa can be any naturally occurring amino acid
  misc_feature (482)..(483): Xaa can be any naturally occurring amino acid
  misc_feature (488)..(489): Xaa can be any naturally occurring amino acid
  misc_feature (494)..(494): Xaa can be any naturally occurring amino acid
  misc_feature (496)..(498): Xaa can be any naturally occurring amino acid
  misc_feature (500)..(501): Xaa can be any naturally occurring amino acid
  misc_feature (504)..(504): Xaa can be any naturally occurring amino acid
  misc_feature (506)..(507): Xaa can be any naturally occurring amino acid
  misc_feature (510)..(512): Xaa can be any naturally occurring amino acid
  misc_feature (514)..(514): Xaa can be any naturally occurring amino acid
  misc_feature (518)..(519): Xaa can be any naturally occurring amino acid
  misc_feature (522)..(523): Xaa can be any naturally occurring amino acid
  misc_feature (525)..(525): Xaa can be any naturally occurring amino acid
  misc_feature (527)..(527): Xaa can be any naturally occurring amino acid
  misc_feature (533)..(533): Xaa can be any naturally occurring amino acid
  misc_feature (535)..(535): Xaa can be any naturally occurring amino acid
  misc_feature (538)..(539): Xaa can be any naturally occurring amino acid
  misc_feature (541)..(546): Xaa can be any naturally occurring amino acid
  misc_feature (549)..(550): Xaa can be any naturally occurring amino acid
  misc_feature (552)..(553): Xaa can be any naturally occurring amino acid
  misc_feature (557)..(569): Xaa can be any naturally occurring amino acid
  misc_feature (571)..(572): Xaa can be any naturally occurring amino acid
  misc_feature (574)..(576): Xaa can be any naturally occurring amino acid
  misc_feature (578)..(583): Xaa can be any naturally occurring amino acid
  misc_feature (585)..(586): Xaa can be any naturally occurring amino acid
  misc_feature (588)..(650): Xaa can be any naturally occurring amino acid
XXXXXXXXXXXXXXXXXXXXXXXXXXXXXXXXXXXXXXXXXXXXXXXXXXXXXXXXXXXXXXXXXXXXXXXXXXXXXXXXXXXXXXXXXXXXXXXXXXXXXXXXXXXXXXXXXXXXXXXXXXXXXXXXXXXXXXXXXXXXXXXXXXXXXXXXXXXXXXXXXXXXXXXXXXPXXXVXXXXXXXXXXXXXXXXXXXXXXXXXXXXXXXXXXXXXXXXXXXXXXXXXXXXXXXXXXXXXXXXXXXXXXXXEXXXXXXXXKXXXXGXXXXXXXXXPXXEXXXXLXXXXXXXXXXXLXXLXXXLXXLXXEXRKDXXXXXXXLXRXXXXXXXXXXXXXXXXXXXXXXXXXXXXLXXGXXXXXXXXXXXXXALXXGXXXRECXXXXXXXXXXLXXXXXXXXXXXXXXXXXXXXXXXXXXXXXXXFFXXIXXXXFXXXXDAXXTFXXXXXXTRHKXXXXXFLXXNXXXFFXXXNXXXLXXSXNYXTXRQXXKLLGXXLLDRXNXXXMXXYVXSXXNLXXXMXLLRXXSKXXQXEXFHVFKXFXANXXKXXXXXXILXXNXXKLLXXXXXXXXXXXXXDXXFXXXKXXXXXXIXXLXXXXXXXXXXXXXXXXXXXXXXXXXXXXXXXXXXXXXXXXXXXXXXXXXXXXXXXXXXXXXXX

SEQ ID NO: 30406 - protein, 650 aa, artificial; identical to SEQ ID NO: 30405
  consensus
  misc_feature (1)..(170): Xaa can be any naturally occurring amino acid
  misc_feature (172)..(174): Xaa can be any naturally occurring amino acid
  misc_feature (176)..(247): Xaa can be any naturally occurring amino acid
  misc_feature (249)..(256): Xaa can be any naturally occurring amino acid
  misc_feature (258)..(261): Xaa can be any naturally occurring amino acid
  misc_feature (263)..(271): Xaa can be any naturally occurring amino acid
  misc_feature (273)..(274): Xaa can be any naturally occurring amino acid
  misc_feature (276)..(279): Xaa can be any naturally occurring amino acid
  misc_feature (281)..(291): Xaa can be any naturally occurring amino acid
  misc_feature (293)..(294): Xaa can be any naturally occurring amino acid
  misc_feature (296)..(298): Xaa can be any naturally occurring amino acid
  misc_feature (300)..(301): Xaa can be any naturally occurring amino acid
  misc_feature (303)..(304): Xaa can be any naturally occurring amino acid
  misc_feature (306)..(306): Xaa can be any naturally occurring amino acid
  misc_feature (310)..(316): Xaa can be any naturally occurring amino acid
  misc_feature (318)..(318): Xaa can be any naturally occurring amino acid
  misc_feature (320)..(347): Xaa can be any naturally occurring amino acid
  misc_feature (349)..(350): Xaa can be any naturally occurring amino acid
  misc_feature (352)..(364): Xaa can be any naturally occurring amino acid
  misc_feature (367)..(368): Xaa can be any naturally occurring amino acid
  misc_feature (370)..(372): Xaa can be any naturally occurring amino acid
  misc_feature (376)..(385): Xaa can be any naturally occurring amino acid
  misc_feature (387)..(417): Xaa can be any naturally occurring amino acid
  misc_feature (420)..(421): Xaa can be any naturally occurring amino acid
  misc_feature (423)..(426): Xaa can be any naturally occurring amino acid
  misc_feature (428)..(431): Xaa can be any naturally occurring amino acid
  misc_feature (434)..(435): Xaa can be any naturally occurring amino acid
  misc_feature (438)..(443): Xaa can be any naturally occurring amino acid
  misc_feature (448)..(452): Xaa can be any naturally occurring amino acid
  misc_feature (455)..(456): Xaa can be any naturally occurring amino acid
  misc_feature (458)..(460): Xaa can be any naturally occurring amino acid
  misc_feature (463)..(465): Xaa can be any naturally occurring amino acid
  misc_feature (467)..(469): Xaa can be any naturally occurring amino acid
  misc_feature (471)..(472): Xaa can be any naturally occurring amino acid
  misc_feature (474)..(474): Xaa can be any naturally occurring amino acid
  misc_feature (477)..(477): Xaa can be any naturally occurring amino acid
  misc_feature (479)..(479): Xaa can be any naturally occurring amino acid
  misc_feature (482)..(483): Xaa can be any naturally occurring amino acid
  misc_feature (488)..(489): Xaa can be any naturally occurring amino acid
  misc_feature (494)..(494): Xaa can be any naturally occurring amino acid
  misc_feature (496)..(498): Xaa can be any naturally occurring amino acid
  misc_feature (500)..(501): Xaa can be any naturally occurring amino acid
  misc_feature (504)..(504): Xaa can be any naturally occurring amino acid
  misc_feature (506)..(507): Xaa can be any naturally occurring amino acid
  misc_feature (510)..(512): Xaa can be any naturally occurring amino acid
  misc_feature (514)..(514): Xaa can be any naturally occurring amino acid
  misc_feature (518)..(519): Xaa can be any naturally occurring amino acid
  misc_feature (522)..(523): Xaa can be any naturally occurring amino acid
  misc_feature (525)..(525): Xaa can be any naturally occurring amino acid
  misc_feature (527)..(527): Xaa can be any naturally occurring amino acid
  misc_feature (533)..(533): Xaa can be any naturally occurring amino acid
  misc_feature (535)..(535): Xaa can be any naturally occurring amino acid
  misc_feature (538)..(539): Xaa can be any naturally occurring amino acid
  misc_feature (541)..(546): Xaa can be any naturally occurring amino acid
  misc_feature (549)..(550): Xaa can be any naturally occurring amino acid
  misc_feature (552)..(553): Xaa can be any naturally occurring amino acid
  misc_feature (557)..(569): Xaa can be any naturally occurring amino acid
  misc_feature (571)..(572): Xaa can be any naturally occurring amino acid
  misc_feature (574)..(576): Xaa can be any naturally occurring amino acid
  misc_feature (578)..(583): Xaa can be any naturally occurring amino acid
  misc_feature (585)..(586): Xaa can be any naturally occurring amino acid
  misc_feature (588)..(650): Xaa can be any naturally occurring amino acid

SEQ ID NO: 30407 - protein, 143 aa, artificial
  consensus
  misc_feature (1)..(14): Xaa can be any naturally occurring amino acid
  misc_feature (18)..(19): Xaa can be any naturally occurring amino acid
  misc_feature (21)..(21): Xaa can be any naturally occurring amino acid
  misc_feature (25)..(25): Xaa can be any naturally occurring amino acid
  misc_feature (27)..(27): Xaa can be any naturally occurring amino acid
  misc_feature (31)..(31): Xaa can be any naturally occurring amino acid
  misc_feature (33)..(33): Xaa can be any naturally occurring amino acid
  misc_feature (37)..(37): Xaa can be any naturally occurring amino acid
  misc_feature (39)..(39): Xaa can be any naturally occurring amino acid
  misc_feature (43)..(44): Xaa can be any naturally occurring amino acid
  misc_feature (50)..(50): Xaa can be any naturally occurring amino acid
  misc_feature (53)..(53): Xaa can be any naturally occurring amino acid
  misc_feature (57)..(57): Xaa can be any naturally occurring amino acid
  misc_feature (64)..(65): Xaa can be any naturally occurring amino acid
  misc_feature (70)..(71): Xaa can be any naturally occurring amino acid
  misc_feature (73)..(73): Xaa can be any naturally occurring amino acid
  misc_feature (76)..(77): Xaa can be any naturally occurring amino acid
  misc_feature (79)..(80): Xaa can be any naturally occurring amino acid
  misc_feature (87)..(89): Xaa can be any naturally occurring amino acid
  misc_feature (91)..(93): Xaa can be any naturally occurring amino acid
  misc_feature (97)..(97): Xaa can be any naturally occurring amino acid
  misc_feature (99)..(99): Xaa can be any naturally occurring amino acid
  misc_feature (114)..(114): Xaa can be any naturally occurring amino acid
  misc_feature (116)..(117): Xaa can be any naturally occurring amino acid
  misc_feature (119)..(119): Xaa can be any naturally occurring amino acid
  misc_feature (121)..(122): Xaa can be any naturally occurring amino acid
  misc_feature (124)..(124): Xaa can be any naturally occurring amino acid
  misc_feature (127)..(128): Xaa can be any naturally occurring amino acid
  misc_feature (130)..(133): Xaa can be any naturally occurring amino acid
  misc_feature (135)..(143): Xaa can be any naturally occurring amino acid
XXXXXXXXXXXXXXMAGXXGXSMLXSXLLFXVXLSLXEXYRGXXASSELXTIXGGFXSSLLFLXXLTFIXXNXQEXXGXXTGWGAVXXXAXXXALIXAXTVHRVCITTCFLFSXAXXLXEXXKXSGXXLXXXXSXXXXXXXXX

SEQ ID NO: 30408 - protein, 143 aa, artificial; identical to SEQ ID NO: 30407
  consensus
  misc_feature (1)..(14): Xaa can be any naturally occurring amino acid
  misc_feature (18)..(19): Xaa can be any naturally occurring amino acid
  misc_feature (21)..(21): Xaa can be any naturally occurring amino acid
  misc_feature (25)..(25): Xaa can be any naturally occurring amino acid
  misc_feature (27)..(27): Xaa can be any naturally occurring amino acid
  misc_feature (31)..(31): Xaa can be any naturally occurring amino acid
  misc_feature (33)..(33): Xaa can be any naturally occurring amino acid
  misc_feature (37)..(37): Xaa can be any naturally occurring amino acid
  misc_feature (39)..(39): Xaa can be any naturally occurring amino acid
  misc_feature (43)..(44): Xaa can be any naturally occurring amino acid
  misc_feature (50)..(50): Xaa can be any naturally occurring amino acid
  misc_feature (53)..(53): Xaa can be any naturally occurring amino acid
  misc_feature (57)..(57): Xaa can be any naturally occurring amino acid
  misc_feature (64)..(65): Xaa can be any naturally occurring amino acid
  misc_feature (70)..(71): Xaa can be any naturally occurring amino acid
  misc_feature (73)..(73): Xaa can be any naturally occurring amino acid
  misc_feature (76)..(77): Xaa can be any naturally occurring amino acid
  misc_feature (79)..(80): Xaa can be any naturally occurring amino acid
  misc_feature (87)..(89): Xaa can be any naturally occurring amino acid
  misc_feature (91)..(93): Xaa can be any naturally occurring amino acid
  misc_feature (97)..(97): Xaa can be any naturally occurring amino acid
  misc_feature (99)..(99): Xaa can be any naturally occurring amino acid
  misc_feature (114)..(114): Xaa can be any naturally occurring amino acid
  misc_feature (116)..(117): Xaa can be any naturally occurring amino acid
  misc_feature (119)..(119): Xaa can be any naturally occurring amino acid
  misc_feature (121)..(122): Xaa can be any naturally occurring amino acid
  misc_feature (124)..(124): Xaa can be any naturally occurring amino acid
  misc_feature (127)..(128): Xaa can be any naturally occurring amino acid
  misc_feature (130)..(133): Xaa can be any naturally occurring amino acid
  misc_feature (135)..(143): Xaa can be any naturally occurring amino acid

SEQ ID NO: 30409 - protein, 485 aa, artificial
  consensus
  misc_feature (1)..(135): Xaa can be any naturally occurring amino acid
  misc_feature (140)..(141): Xaa can be any naturally occurring amino acid
  misc_feature (143)..(144): Xaa can be any naturally occurring amino acid
  misc_feature (153)..(153): Xaa can be any naturally occurring amino acid
  misc_feature (155)..(216): Xaa can be any naturally occurring amino acid
  misc_feature (218)..(219): Xaa can be any naturally occurring amino acid
  misc_feature (222)..(222): Xaa can be any naturally occurring amino acid
  misc_feature (225)..(228): Xaa can be any naturally occurring amino acid
  misc_feature (233)..(234): Xaa can be any naturally occurring amino acid
  misc_feature (236)..(237): Xaa can be any naturally occurring amino acid
  misc_feature (239)..(239): Xaa can be any naturally occurring amino acid
  misc_feature (241)..(242): Xaa can be any naturally occurring amino acid
  misc_feature (244)..(246): Xaa can be any naturally occurring amino acid
  misc_feature (248)..(268): Xaa can be any naturally occurring amino acid
  misc_feature (271)..(272): Xaa can be any naturally occurring amino acid
  misc_feature (277)..(281): Xaa can be any naturally occurring amino acid
  misc_feature (285)..(285): Xaa can be any naturally occurring amino acid
  misc_feature (287)..(289): Xaa can be any naturally occurring amino acid
  misc_feature (291)..(294): Xaa can be any naturally occurring amino acid
  misc_feature (296)..(296): Xaa can be any naturally occurring amino acid
  misc_feature (298)..(300): Xaa can be any naturally occurring amino acid
  misc_feature (302)..(302): Xaa can be any naturally occurring amino acid
  misc_feature (306)..(306): Xaa can be any naturally occurring amino acid
  misc_feature (309)..(309): Xaa can be any naturally occurring amino acid
  misc_feature (312)..(318): Xaa can be any naturally occurring amino acid
  misc_feature (320)..(321): Xaa can be any naturally occurring amino acid
  misc_feature (323)..(323): Xaa can be any naturally occurring amino acid
  misc_feature (326)..(326): Xaa can be any naturally occurring amino acid
  misc_feature (329)..(329): Xaa can be any naturally occurring amino acid
  misc_feature (331)..(332): Xaa can be any naturally occurring amino acid
  misc_feature (335)..(336): Xaa can be any naturally occurring amino acid
  misc_feature (339)..(339): Xaa can be any naturally occurring amino acid
  misc_feature (341)..(400): Xaa can be any naturally occurring amino acid
  misc_feature (402)..(405): Xaa can be any naturally occurring amino acid
  misc_feature (412)..(413): Xaa can be any naturally occurring amino acid
  misc_feature (415)..(417): Xaa can be any naturally occurring amino acid
  misc_feature (420)..(422): Xaa can be any naturally occurring amino acid
  misc_feature (424)..(424): Xaa can be any naturally occurring amino acid
  misc_feature (428)..(432): Xaa can be any naturally occurring amino acid
  misc_feature (434)..(435): Xaa can be any naturally occurring amino acid
  misc_feature (437)..(439): Xaa can be any naturally occurring amino acid
  misc_feature (441)..(441): Xaa can be any naturally occurring amino acid
  misc_feature (444)..(452): Xaa can be any naturally occurring amino acid
  misc_feature (454)..(455): Xaa can be any naturally occurring amino acid
  misc_feature (457)..(457): Xaa can be any naturally occurring amino acid
  misc_feature (459)..(461): Xaa can be any naturally occurring amino acid
  misc_feature (463)..(465): Xaa can be any naturally occurring amino acid
  misc_feature (469)..(485): Xaa can be any naturally occurring amino acid
XXXXXXXXXXXXXXXXXXXXXXXXXXXXXXXXXXXXXXXXXXXXXXXXXXXXXXXXXXXXXXXXXXXXXXXXXXXXXXXXXXXXXXXXXXXXXXXXXXXXXXXXXXXXXXXXXXXXXXXXXXXXXXXXXXXXXXXYPGEXXGXXEEMRFVAMXLXXXXXXXXXXXXXXXXXXXXXXXXXXXXXXXXXXXXXXXXXXXXXXXXXXXXXXXXXXXXXXWXXPSXEGXXXXLVDSXXVXXTXEXXVXXXSXXXXXXXXXXXXXXXXXXXXXFRXXGLERXXXXXKDLXWXXXQXXXXPXPXXXGXTYAXYLXELXXXXXXXFXXHXYNXYFXHXXGGXXIGXKXXXXXXXXXXXXXXXXXXXXXXXXXXXXXXXXXXXXXXXXXXXXXXXXXXXXXXXXXXXXLXXXXLEFYKWXXDXXXLLXXXRXKLNXXXXXWXXRXXXNXCLXXXXXXXXXEXXKXFXXXGXXXRLIXXXXXXXXXXXXXXXXX

SEQ ID NO: 30410 - protein, 291 aa, artificial
  consensus
  misc_feature (1)..(12): Xaa can be any naturally occurring amino acid
  misc_feature (14)..(14): Xaa can be any naturally occurring amino acid
  misc_feature (19)..(19): Xaa can be any naturally occurring amino acid
  misc_feature (32)..(34): Xaa can be any naturally occurring amino acid
  misc_feature (37)..(38): Xaa can be any naturally occurring amino acid
  misc_feature (42)..(43): Xaa can be any naturally occurring amino acid
  misc_feature (47)..(47): Xaa can be any naturally occurring amino acid
  misc_feature (54)..(55): Xaa can be any naturally occurring amino acid
  misc_feature (66)..(66): Xaa can be any naturally occurring amino acid
  misc_feature (70)..(70): Xaa can be any naturally occurring amino acid
  misc_feature (76)..(76): Xaa can be any naturally occurring amino acid
  misc_feature (80)..(81): Xaa can be any naturally occurring amino acid
  misc_feature (83)..(83): Xaa can be any naturally occurring amino acid
  misc_feature (86)..(86): Xaa can be any naturally occurring amino acid
  misc_feature (91)..(92): Xaa can be any naturally occurring amino acid
  misc_feature (99)..(99): Xaa can be any naturally occurring amino acid
  misc_feature (103)..(104): Xaa can be any naturally occurring amino acid
  misc_feature (106)..(106): Xaa can be any naturally occurring amino acid
  misc_feature (110)..(110): Xaa can be any naturally occurring amino acid
  misc_feature (113)..(114): Xaa can be any naturally occurring amino acid
  misc_feature (116)..(117): Xaa can be any naturally occurring amino acid
  misc_feature (119)..(122): Xaa can be any naturally occurring amino acid
  misc_feature (126)..(131): Xaa can be any naturally occurring amino acid
  misc_feature (135)..(141): Xaa can be any naturally occurring amino acid
  misc_feature (143)..(149): Xaa can be any naturally occurring amino acid
  misc_feature (151)..(151): Xaa can be any naturally occurring amino acid
  misc_feature (154)..(154): Xaa can be any naturally occurring amino acid
  misc_feature (159)..(160): Xaa can be any naturally occurring amino acid
  misc_feature (168)..(168): Xaa can be any naturally occurring amino acid
  misc_feature (170)..(171): Xaa can be any naturally occurring amino acid
  misc_feature (178)..(179): Xaa can be any naturally occurring amino acid
  misc_feature (181)..(182): Xaa can be any naturally occurring amino acid
  misc_feature (184)..(185): Xaa can be any naturally occurring amino acid
  misc_feature (188)..(189): Xaa can be any naturally occurring amino acid
  misc_feature (191)..(192): Xaa can be any naturally occurring amino acid
  misc_feature (196)..(196): Xaa can be any naturally occurring amino acid
  misc_feature (204)..(204): Xaa can be any naturally occurring amino acid
  misc_feature (207)..(211): Xaa can be any naturally occurring amino acid
  misc_feature (215)..(220): Xaa can be any naturally occurring amino acid
  misc_feature (222)..(222): Xaa can be any naturally occurring amino acid
  misc_feature (224)..(230): Xaa can be any naturally occurring amino acid
  misc_feature (233)..(234): Xaa can be any naturally occurring amino acid
  misc_feature (238)..(238): Xaa can be any naturally occurring amino acid
  misc_feature (241)..(241): Xaa can be any naturally occurring amino acid
  misc_feature (246)..(291): Xaa can be any naturally occurring amino acid
XXXXXXXXXXXXFXDSLKXLEADIQHANTLAXXXPRXXDGAXXQMRXSYSPAAXXFLFLVQWTDCXLAGXLGLLRXLIYXXYXDGXTTMSXXERKASIXEFYXXIXPSLXQLXXGXXDXXXXKQKXXXXXXRYRXXXXXXXDXXXXXXXSXIDXEREEXXECGICMEXNXXVVLPNCXXHXXCXXCYXXWXXRSQXSCPFCRDXLKXXXXXDLWXXXXXXDXVXXXXXXXENXXRLFXYIXKLPLXXXXXXXXXXXXXXXXXXXXXXXXXXXXXXXXXXXXXXXXXXXXXX

SEQ ID NO: 30411 - protein, 348 aa, artificial
  consensus
  misc_feature (1)..(194): Xaa can be any naturally occurring amino acid
  misc_feature (197)..(199): Xaa can be any naturally occurring amino acid
  misc_feature (201)..(205): Xaa can be any naturally occurring amino acid
  misc_feature (207)..(212): Xaa can be any naturally occurring amino acid
  misc_feature (214)..(227): Xaa can be any naturally occurring amino acid
  misc_feature (229)..(231): Xaa can be any naturally occurring amino acid
  misc_feature (233)..(233): Xaa can be any naturally occurring amino acid
  misc_feature (236)..(236): Xaa can be any naturally occurring amino acid
  misc_feature (239)..(240): Xaa can be any naturally occurring amino acid
  misc_feature (244)..(257): Xaa can be any naturally occurring amino acid
  misc_feature (260)..(271): Xaa can be any naturally occurring amino acid
  misc_feature (273)..(277): Xaa can be any naturally occurring amino acid
  misc_feature (279)..(282): Xaa can be any naturally occurring amino acid
  misc_feature (284)..(284): Xaa can be any naturally occurring amino acid
  misc_feature (286)..(286): Xaa can be any naturally occurring amino acid
  misc_feature (288)..(288): Xaa can be any naturally occurring amino acid
  misc_feature (295)..(298): Xaa can be any naturally occurring amino acid
  misc_feature (302)..(302): Xaa can be any naturally occurring amino acid
  misc_feature (304)..(304): Xaa can be any naturally occurring amino acid
  misc_feature (306)..(314): Xaa can be any naturally occurring amino acid
  misc_feature (316)..(320): Xaa can be any naturally occurring amino acid
  misc_feature (323)..(329): Xaa can be any naturally occurring amino acid
  misc_feature (331)..(348): Xaa can be any naturally occurring amino acid
XXXXXXXXXXXXXXXXXXXXXXXXXXXXXXXXXXXXXXXXXXXXXXXXXXXXXXXXXXXXXXXXXXXXXXXXXXXXXXXXXXXXXXXXXXXXXXXXXXXXXXXXXXXXXXXXXXXXXXXXXXXXXXXXXXXXXXXXXXXXXXXXXXXXXXXXXXXXXXXXXXXXXXXXXXXXXXXXXXXXXXXXXXXXXXXXXXFRXXXPXXXXXWXXXXXXPXXXXXXXXXXXXXXWXXXGXLGXFNXXNLQXXXXXXXXXXXXXXYDXXXXXXXXXXXXHXXXXXEXXXXWXRXWXDLGTSDXXXXDVLXNXLXXXXXXXXXIXXXXXGGXXXXXXXEXXXXXXXXXXXXXXXXXX

SEQ ID NO: 30412 - protein, 166 aa, artificial
  consensus
  misc_feature (1)..(67): Xaa can be any naturally occurring amino acid
  misc_feature (69)..(83): Xaa can be any naturally occurring amino acid
  misc_feature (86)..(89): Xaa can be any naturally occurring amino acid
  misc_feature (92)..(92): Xaa can be any naturally occurring amino acid
  misc_feature (95)..(98): Xaa can be any naturally occurring amino acid
  misc_feature (100)..(101): Xaa can be any naturally occurring amino acid
  misc_feature (103)..(107): Xaa can be any naturally occurring amino acid
  misc_feature (110)..(111): Xaa can be any naturally occurring amino acid
  misc_feature (115)..(115): Xaa can be any naturally occurring amino acid
  misc_feature (118)..(118): Xaa can be any naturally occurring amino acid
  misc_feature (122)..(123): Xaa can be any naturally occurring amino acid
  misc_feature (129)..(129): Xaa can be any naturally occurring amino acid
  misc_feature (131)..(132): Xaa can be any naturally occurring amino acid
  misc_feature (138)..(145): Xaa can be any naturally occurring amino acid
  misc_feature (147)..(148): Xaa can be any naturally occurring amino acid
  misc_feature (151)..(155): Xaa can be any naturally occurring amino acid
  misc_feature (157)..(157): Xaa can be any naturally occurring amino acid
  misc_feature (159)..(160): Xaa can be any naturally occurring amino acid
  misc_feature (163)..(163): Xaa can be any naturally occurring amino acid
  misc_feature (165)..(166): Xaa can be any naturally occurring amino acid
XXXXXXXXXXXXXXXXXXXXXXXXXXXXXXXXXXXXXXXXXXXXXXXXXXXXXXXXXXXXXXXXXXXMXXXXXXXXXXXXXXXVKXXXXLGXESXXXXSXXGXXXXXQLXXMKEXSMXILKXXITKHNXPXXDVPDEXXXXXXXXDXXDAXXXXXPXKXXKKXKXX

SEQ ID NO: 30413 - protein, 206 aa, artificial
  consensus
  misc_feature (1)..(88): Xaa can be any naturally occurring amino acid
  misc_feature (96)..(96): Xaa can be any naturally occurring amino acid
  misc_feature (99)..(99): Xaa can be any naturally occurring amino acid
  misc_feature (106)..(106): Xaa can be any naturally occurring amino acid
  misc_feature (113)..(113): Xaa can be any naturally occurring amino acid
  misc_feature (115)..(116): Xaa can be any naturally occurring amino acid
  misc_feature (119)..(121): Xaa can be any naturally occurring amino acid
  misc_feature (124)..(124): Xaa can be any naturally occurring amino acid
  misc_feature (126)..(126): Xaa can be any naturally occurring amino acid
  misc_feature (128)..(128): Xaa can be any naturally occurring amino acid
  misc_feature (131)..(132): Xaa can be any naturally occurring amino acid
  misc_feature (138)..(139): Xaa can be any naturally occurring amino acid
  misc_feature (142)..(142): Xaa can be any naturally occurring amino acid
  misc_feature (144)..(144): Xaa can be any naturally occurring amino acid
  misc_feature (149)..(149): Xaa can be any naturally occurring amino acid
  misc_feature (153)..(180): Xaa can be any naturally occurring amino acid
  misc_feature (185)..(185): Xaa can be any naturally occurring amino acid
  misc_feature (187)..(206): Xaa can be any naturally occurring amino acid
XXXXXXXXXXXXXXXXXXXXXXXXXXXXXXXXXXXXXXXXXXXXXXXXXXXXXXXXXXXXXXXXXXXXXXXXXXXXXXXXXXXXXXXXMADWGPVXIAXVLFVLLXPGLLFQXPXXGRXXXFGXMXTXSGXXILVHAXXYFXLXTIFLXAIGXXXXXXXXXXXXXXXXXXXXXXXXXXXXVHIYXGXXXXXXXXXXXXXXXXXXXX

SEQ ID NO: 30414 - protein, 206 aa, artificial; identical to SEQ ID NO: 30413
  consensus
  misc_feature (1)..(88): Xaa can be any naturally occurring amino acid
  misc_feature (96)..(96): Xaa can be any naturally occurring amino acid
  misc_feature (99)..(99): Xaa can be any naturally occurring amino acid
  misc_feature (106)..(106): Xaa can be any naturally occurring amino acid
  misc_feature (113)..(113): Xaa can be any naturally occurring amino acid
  misc_feature (115)..(116): Xaa can be any naturally occurring amino acid
  misc_feature (119)..(121): Xaa can be any naturally occurring amino acid
  misc_feature (124)..(124): Xaa can be any naturally occurring amino acid
  misc_feature (126)..(126): Xaa can be any naturally occurring amino acid
  misc_feature (128)..(128): Xaa can be any naturally occurring amino acid
  misc_feature (131)..(132): Xaa can be any naturally occurring amino acid
  misc_feature (138)..(139): Xaa can be any naturally occurring amino acid
  misc_feature (142)..(142): Xaa can be any naturally occurring amino acid
  misc_feature (144)..(144): Xaa can be any naturally occurring amino acid
  misc_feature (149)..(149): Xaa can be any naturally occurring amino acid
  misc_feature (153)..(180): Xaa can be any naturally occurring amino acid
  misc_feature (185)..(185): Xaa can be any naturally occurring amino acid
  misc_feature (187)..(206): Xaa can be any naturally occurring amino acid

SEQ ID NO: 30415 - protein, 132 aa, artificial
  consensus
  misc_feature (1)..(28): Xaa can be any naturally occurring amino acid
  misc_feature (31)..(46): Xaa can be any naturally occurring amino acid
  misc_feature (48)..(51): Xaa can be any naturally occurring amino acid
  misc_feature (53)..(53): Xaa can be any naturally occurring amino acid
  misc_feature (56)..(56): Xaa can be any naturally occurring amino acid
  misc_feature (61)..(61): Xaa can be any naturally occurring amino acid
  misc_feature (65)..(68): Xaa can be any naturally occurring amino acid
  misc_feature (70)..(77): Xaa can be any naturally occurring amino acid
  misc_feature (79)..(80): Xaa can be any naturally occurring amino acid
  misc_feature (82)..(82): Xaa can be any naturally occurring amino acid
  misc_feature (84)..(84): Xaa can be any naturally occurring amino acid
  misc_feature (88)..(88): Xaa can be any naturally occurring amino acid
  misc_feature (91)..(91): Xaa can be any naturally occurring amino acid
  misc_feature (95)..(95): Xaa can be any naturally occurring amino acid
  misc_feature (102)..(102): Xaa can be any naturally occurring amino acid
  misc_feature (106)..(106): Xaa can be any naturally occurring amino acid
  misc_feature (108)..(111): Xaa can be any naturally occurring amino acid
  misc_feature (113)..(119): Xaa can be any naturally occurring amino acid
  misc_feature (121)..(122): Xaa can be any naturally occurring amino acid
  misc_feature (124)..(124): Xaa can be any naturally occurring amino acid
  misc_feature (131)..(132): Xaa can be any naturally occurring amino acid
XXXXXXXXXXXXXXXXXXXXXXXXXXXXSRXXXXXXXXXXXXXXXXIXXXXIXELXSKLQXLLPXXXXRXXXXXXXXSXXKXLXETCXYIXSLHXEVDDLSXRLSXLXXXXDXXXXXXXSXXAXIIRSLLXX

SEQ ID NO: 30416 - protein, 1054 aa, artificial
  consensus
  misc_feature (1)..(175): Xaa can be any naturally occurring amino acid
  misc_feature (177)..(179): Xaa can be any naturally occurring amino acid
  misc_feature (185)..(185): Xaa can be any naturally occurring amino acid
  misc_feature (187)..(188): Xaa can be any naturally occurring amino acid
  misc_feature (190)..(192): Xaa can be any naturally occurring amino acid
  misc_feature (195)..(195): Xaa can be any naturally occurring amino acid
  misc_feature (198)..(201): Xaa can be any naturally occurring amino acid
  misc_feature (203)..(205): Xaa can be any naturally occurring amino acid
  misc_feature (209)..(213): Xaa can be any naturally occurring amino acid
  misc_feature (216)..(216): Xaa can be any naturally occurring amino acid
  misc_feature (220)..(231): Xaa can be any naturally occurring amino acid
  misc_feature (233)..(236): Xaa can be any naturally occurring amino acid
  misc_feature (238)..(238): Xaa can be any naturally occurring amino acid
  misc_feature (240)..(241): Xaa can be any naturally occurring amino acid
  misc_feature (243)..(263): Xaa can be any naturally occurring amino acid
  misc_feature (265)..(265): Xaa can be any naturally occurring amino acid
  misc_feature (267)..(267): Xaa can be any naturally occurring amino acid
  misc_feature (272)..(298): Xaa can be any naturally occurring amino acid
  misc_feature (300)..(300): Xaa can be any naturally occurring amino acid
  misc_feature (302)..(302): Xaa can be any naturally occurring amino acid
  misc_feature (304)..(305): Xaa can be any naturally occurring amino acid
  misc_feature (309)..(311): Xaa can be any naturally occurring amino acid
  misc_feature (314)..(334): Xaa can be any naturally occurring amino acid
  misc_feature (337)..(337): Xaa can be any naturally occurring amino acid
  misc_feature (342)..(343): Xaa can be any naturally occurring amino acid
  misc_feature (345)..(346): Xaa can be any naturally occurring amino acid
  misc_feature (348)..(401): Xaa can be any naturally occurring amino acid
  misc_feature (404)..(405): Xaa can be any naturally occurring amino acid
  misc_feature (407)..(409): Xaa can be any naturally occurring amino acid
  misc_feature (411)..(414): Xaa can be any naturally occurring amino acid
  misc_feature (418)..(418): Xaa can be any naturally occurring amino acid
  misc_feature (422)..(425): Xaa can be any naturally occurring amino acid
  misc_feature (428)..(435): Xaa can be any naturally occurring amino acid
  misc_feature (437)..(540): Xaa can be any naturally occurring amino acid
  misc_feature (542)..(545): Xaa can be any naturally occurring amino acid
  misc_feature (547)..(547): Xaa can be any naturally occurring amino acid
  misc_feature (549)..(553): Xaa can be any naturally occurring amino acid
  misc_feature (555)..(557): Xaa can be any naturally occurring amino acid
  misc_feature (560)..(584): Xaa can be any naturally occurring amino acid
  misc_feature (586)..(1054): Xaa can be any naturally occurring amino acid
XXXXXXXXXXXXXXXXXXXXXXXXXXXXXXXXXXXXXXXXXXXXXXXXXXXXXXXXXXXXXXXXXXXXXXXXXXXXXXXXXXXXXXXXXXXXXXXXXXXXXXXXXXXXXXXXXXXXXXXXXXXXXXXXXXXXXXXXXXXXXXXXXXXXXXXXXXXXXXXXXXXXXXXXXXXXXXXPXXXVLVPPXFXXPXXXARXRMXXXXYXXXFGKXXXXXLFXDYFXXXXXXXXXXXXLXXXXDXHXXLXXXXXXXXXXXXXXXXXXXXXGXAXFRWQXXXXXXXXXXXXXXXXXXXXXXXXXXXYXPXYXXGAFXXXPLXXXXXXXXXXXXXXXXXXXXXMGXRYGSXXLXXGXXXXXXXXXXXXXXXXXXXXXXXXXXXXXXXXXXXXXXXXXXXXXXXXXXXXXXNWXXAXXXGXXXXSPLXPSFXXXXELXXXXXXXXSXXXXXXXXXXXXXXXXXXXXXXXXXXXXXXXXXXXXXXXXXXXXXXXXXXXXXXXXXXXXXXXXXXXXXXXXXXXXXXXXXXXXXXXXXXXXXXXXXXXXXXXXGXXXXGXGXXXXXLXXXSYXXXXXXXXXXXXXXXXXXXXXXXXXGXXXXXXXXXXXXXXXXXXXXXXXXXXXXXXXXXXXXXXXXXXXXXXXXXXXXXXXXXXXXXXXXXXXXXXXXXXXXXXXXXXXXXXXXXXXXXXXXXXXXXXXXXXXXXXXXXXXXXXXXXXXXXXXXXXXXXXXXXXXXXXXXXXXXXXXXXXXXXXXXXXXXXXXXXXXXXXXXXXXXXXXXXXXXXXXXXXXXXXXXXXXXXXXXXXXXXXXXXXXXXXXXXXXXXXXXXXXXXXXXXXXXXXXXXXXXXXXXXXXXXXXXXXXXXXXXXXXXXXXXXXXXXXXXXXXXXXXXXXXXXXXXXXXXXXXXXXXXXXXXXXXXXXXXXXXXXXXXXXXXXXXXXXXXXXXXXXXXXXXXXXXXXXXXXXXXXXXXXXXXXXXXXXXXXXXXXXXXXXXXXXXXXXXXXXXXXXXXXXXXXXXXXXXXXXXXXXXXXXXXXXXXXXXXXXXXXXXXXXXXXXXXXXXXX

SEQ ID NO: 30417 - protein, 594 aa, artificial
  consensus
  misc_feature (1)..(37): Xaa can be any naturally occurring amino acid
  misc_feature (39)..(40): Xaa can be any naturally occurring amino acid
  misc_feature (42)..(48): Xaa can be any naturally occurring amino acid
  misc_feature (50)..(53): Xaa can be any naturally occurring amino acid
  misc_feature (55)..(58): Xaa can be any naturally occurring amino acid
  misc_feature (60)..(61): Xaa can be any naturally occurring amino acid
  misc_feature (67)..(69): Xaa can be any naturally occurring amino acid
  misc_feature (71)..(72): Xaa can be any naturally occurring amino acid
  misc_feature (74)..(107): Xaa can be any naturally occurring amino acid
  misc_feature (110)..(136): Xaa can be any naturally occurring amino acid
  misc_feature (138)..(188): Xaa can be any naturally occurring amino acid
  misc_feature (190)..(190): Xaa can be any naturally occurring amino acid
  misc_feature (198)..(226): Xaa can be any naturally occurring amino acid
  misc_feature (232)..(234): Xaa can be any naturally occurring amino acid
  misc_feature (236)..(238): Xaa can be any naturally occurring amino acid
  misc_feature (240)..(241): Xaa can be any naturally occurring amino acid
  misc_feature (243)..(244): Xaa can be any naturally occurring amino acid
  misc_feature (246)..(256): Xaa can be any naturally occurring amino acid
  misc_feature (258)..(260): Xaa can be any naturally occurring amino acid
  misc_feature (263)..(265): Xaa can be any naturally occurring amino acid
  misc_feature (267)..(268): Xaa can be any naturally occurring amino acid
  misc_feature (270)..(273): Xaa can be any naturally occurring amino acid
  misc_feature (277)..(277): Xaa can be any naturally occurring amino acid
  misc_feature (281)..(333): Xaa can be any naturally occurring amino acid
  misc_feature (337)..(337): Xaa can be any naturally occurring amino acid
  misc_feature (341)..(341): Xaa can be any naturally occurring amino acid
  misc_feature (343)..(594): Xaa can be any naturally occurring amino acid
XXXXXXXXXXXXXXXXXXXXXXXXXXXXXXXXXXXXXLXXEXXXXXXXLXXXXQXXXXLXXEVRFLXXXYXXLXXXXXXXXXXXXXXXXXXXXXXXXXXXXXXXXXXRKXXXXXXXXXXXXXXXXXXXXXXXXXXXLXXXXXXXXXXXXXXXXXXXXXXXXXXXXXXXXXXXXXXXXXXXXXXXXXXXPXFDLNQISXXXXXXXXXXXXXXXXXXXXXXXXXXXXXREEEEXXXNXXXMXXEXXKXXXXXXXXXXXHXXXKLXXXCXXVXXXXNRAXKRKXXXXXXXXXXXXXXXXXXXXXXXXXXXXXXXXXXXXXXXXXXXXXXXXXXXXXWQDXVALXVXXXXXXXXXXXXXXXXXXXXXXXXXXXXXXXXXXXXXXXXXXXXXXXXXXXXXXXXXXXXXXXXXXXXXXXXXXXXXXXXXXXXXXXXXXXXXXXXXXXXXXXXXXXXXXXXXXXXXXXXXXXXXXXXXXXXXXXXXXXXXXXXXXXXXXXXXXXXXXXXXXXXXXXXXXXXXXXXXXXXXXXXXXXXXXXXXXXXXXXXXXXXXXXXXXXXXXXXXXXXXXXXXXXXXXXXXXXXXXXXXXXXXXXXXXXX

SEQ ID NO: 30418 - protein, 594 aa, artificial; identical to SEQ ID NO: 30417
  consensus
  misc_feature (1)..(37): Xaa can be any naturally occurring amino acid
  misc_feature (39)..(40): Xaa can be any naturally occurring amino acid
  misc_feature (42)..(48): Xaa can be any naturally occurring amino acid
  misc_feature (50)..(53): Xaa can be any naturally occurring amino acid
  misc_feature (55)..(58): Xaa can be any naturally occurring amino acid
  misc_feature (60)..(61): Xaa can be any naturally occurring amino acid
  misc_feature (67)..(69): Xaa can be any naturally occurring amino acid
  misc_feature (71)..(72): Xaa can be any naturally occurring amino acid
  misc_feature (74)..(107): Xaa can be any naturally occurring amino acid
  misc_feature (110)..(136): Xaa can be any naturally occurring amino acid
  misc_feature (138)..(188): Xaa can be any naturally occurring amino acid
  misc_feature (190)..(190): Xaa can be any naturally occurring amino acid
  misc_feature (198)..(226): Xaa can be any naturally occurring amino acid
  misc_feature (232)..(234): Xaa can be any naturally occurring amino acid
  misc_feature (236)..(238): Xaa can be any naturally occurring amino acid
  misc_feature (240)..(241): Xaa can be any naturally occurring amino acid
  misc_feature (243)..(244): Xaa can be any naturally occurring amino acid
  misc_feature (246)..(256): Xaa can be any naturally occurring amino acid
  misc_feature (258)..(260): Xaa can be any naturally occurring amino acid
  misc_feature (263)..(265): Xaa can be any naturally occurring amino acid
  misc_feature (267)..(268): Xaa can be any naturally occurring amino acid
  misc_feature (270)..(273): Xaa can be any naturally occurring amino acid
  misc_feature (277)..(277): Xaa can be any naturally occurring amino acid
  misc_feature (281)..(333): Xaa can be any naturally occurring amino acid
  misc_feature (337)..(337): Xaa can be any naturally occurring amino acid
  misc_feature (341)..(341): Xaa can be any naturally occurring amino acid
  misc_feature (343)..(594): Xaa can be any naturally occurring amino acid
